(19) United States
(12) Patent Application Publication
(10) Pub. No.: US 2012/0040858 A1
(43) Pub. Date: Feb. 16, 2012

(54) BIOMARKERS FOR STROKE

(75) Inventors: Byron D. FORD, Atlanta, GA (US); Gregory Ford, Cartersville, GA (US)

(73) Assignee: Morehouse School of Medicine, Atlanta, GA (US)

(21) Appl. No.: 13/204,358

(22) Filed: Aug. 5, 2011

Related U.S. Application Data
(60) Provisional application No. 61/344,517, filed on Aug. 13, 2010.

(51) Int. Cl. C40B 30/04; C12Q 1/48; C12Q 1/34; G01N 33/566

(52) U.S. Cl. 506/9; 435/7.92; 436/501; 435/15; 435/18; 435/7.1; 435/7.21

(57) ABSTRACT

Biomarkers for stroke and methods for their detection are disclosed. In one aspect, the present application discloses biomarkers for the diagnosis of stroke in a subject. In another aspect, the application discloses a method for the diagnosis of stroke in a subject. The method comprises detection of stroke biomarkers in cerebrospinal fluid, blood, serum or PMBCs of a subject. Also disclosed is a kit for the detection of biomarkers for the diagnosis of stroke in a subject.

[0001] This application claims the priority from U.S. Provisional Patent Application No. 61/344,517, filed on Aug. 13, 2010. The entirety of the aforementioned application is incorporated herein by reference.

### FIELD

[0002] This application generally relates to the diagnosis, management and therapy of stroke. In particular, the invention relates to methods and kits for the diagnosis and monitoring the progression and treatment of stroke in a subject.

### BACKGROUND

[0003] Stroke is a debilitating condition with limited treatment options. Currently, thrombolysis is the only approved therapy for stroke. However, thrombolysis is effective in only 3-5% of stroke patients, primarily due to its very short therapeutic window. Stabilization of stroke patients inside and outside the therapeutic window for thrombolysis is also essential to prevent the progression of the initial ischemic lesion into expanding regions of brain damage. Imaging techniques, including computed tomography (CT) scanning and magnetic resonance imaging (MRI) are very useful in detecting the occurrence, type and severity of strokes. However, these technologies are expensive and require considerable amounts of time to develop a complete and correct diagnosis. This is particularly true in rural areas and cities with large, underserved populations.

[0004] In addition to the failure to produce effective therapies for stroke treatment, a dramatic disparity exists in the rate of mortality from stroke between African-Americans and white counterparts. Reducing health disparities associated with stroke remains a major public health challenge in the United States. Despite dramatic declines in stroke mortality between 1970 and 1990 for both white and African-Americans, African-American men and women still have almost twice the rate of death due to stroke as their white counterparts.

[0005] Prompt diagnosis of a stroke is important, as delays in diagnosis and medical intervention may contribute to clinical deterioration and disability. Early diagnosis enables clinicians to more effectively choose the emergency intervention such as anti-platelet and/or neuroprotective therapy, and also to make better prognoses of disease outcome. Successful treatment of stroke requires rapid state diagnosis. Delays in diagnosis reduce the amount of time available in which the brain can respond to reperfusion, and significantly increase the risk of hemorrhage after most of the permanent injury has occurred.

[0006] There has been a long-felt need to develop rapid, accessible and easy to use diagnostic tools to identify and treat stroke symptoms. The use of blood biomarkers for stroke has been long considered an excellent method to determine the occurrence, timing, subtype and severity of stroke. Blood biomarkers can also be used to determine the efficacy of existing and novel treatment strategies for stroke.

[0007] The search for specific, reliable and clinically useful biomarkers has been largely unsuccessful. Many biomarkers that were believed to have promise are only detectable many hours or days after a stroke, by which time they would no longer be helpful (Anand, N et al. (2005) Cerebrovasc Dis 20:213-219). Additionally, some assays for markers of interest require labor-intensive laboratory work, requiring long turn-around time for results and limited availability.

[0008] An ideal biomarker should be specific to the type of stroke (such as ischemic stroke), sensitive (early and immediate release), predictive (proportionate to the extent of injury), robust (accurate and inexpensive), non-invasive and bridge pre-clinical results and clinical validation. Advanced technologies including genomic analysis and proteomics have facilitated the discovery of effective cancer biomarkers and could lead to discovery of stroke markers. One advantage of high throughput microarray-based genomic and proteomic analyses is the capacity to identify a group or cluster of genes and proteins with altered expression patterns in tissue or body fluids that encode putative secreted or cell-surface proteins. An ischemic stroke genomic biomarker would be a measurable RNA characteristic that is an indicator of normal biological processes, ischemic injury and/or response to therapeutic interventions. A proteomic biomarker would detect peptides or proteins in plasma or serum. It is also important that a stroke biomarker correlate well with findings from neuroimaging and clinical diagnostic examinations.

### SUMMARY

[0009] One aspect of the present invention relates to a method for diagnosing stroke in a subject. The method comprises the steps of (a) measuring the level of one or more biomarkers in a sample from the subject; (b) comparing the level of the one or more biomarkers to a reference level of the one or more biomarkers; and (c) making a diagnosis based on the result of the comparing step. The one or more biomarkers comprise gene products expressed from genes selected from the group consisting of IL-1α, IL-1β, IL-1ra, IL-3, IL-2, IL-4, IL-5, IL-6, IL-7, IL-8, IL-9, IL-10, IL-12 (p40), IL-12(p70), IL-13, IL-15, IL-17, EGF, Eotaxin, FGF-2, FTL-3 ligand, Fractalkine, G-CSF, GM-CSF, GRO, IFN-α2, IFN-γ, IP-10, MCP-1, MCP-3, MCD, MIP-1α, MIP-1β, PDGF-aa, PGDF-aa bb, RANTES, sCD40L, sIL2-rα, TNF-α, TNF-β, VEGF and genes listed in Tables 4, 5, 6 and 8.

[0010] In one embodiment, the one or more biomarkers are polynucleotides.

[0011] In another embodiment, the one or more biomarkers are proteins or peptides.

[0012] In another embodiment, step (a) includes measuring a panel of three or more biomarkers in the sample from the subject.

[0013] In another embodiment, step (a) includes measuring a panel of three or more biomarkers in the sample from the subject. In certain embodiments, the panel comprises at least one immediate early stroke biomarker (i.e., markers differentially expressed at 1 hour post-stroke), at least one early stroke biomarker (i.e., markers differentially expressed at 2 hour post-stroke) and at least one late stroke biomarker (i.e., differentially expressed at 24 hour post-stroke). In certain other embodiments, the panel comprises at least two immediate early stroke biomarker (differentially expressed at 1 hour post-stroke), at least two early stroke biomarker (differentially expressed at 2 hour post-stroke) and at least two late stroke biomarker (differentially expressed at 24 hour post-stroke). In certain other embodiments, the panel comprises at least three immediate early stroke biomarkers, at least three early stroke biomarkers and at least three late stroke biomarkers.

[0014] Another aspect of the present invention relates to a method for determining disease progression in a subject after a stroke. The method comprises the steps of (a) measuring the level of one or more biomarkers in a first sample obtained from the subject at a first time point; (b) measuring the level of the one or more biomarkers in a second sample obtained from the subject at a second time point; (c) comparing the level of the one or more biomarkers at the first time point to the level of the one or more biomarkers at the second time point; and (d) determining the disease progression between the first and the second time point based on the result of step (c). The one or more biomarkers comprise gene products expressed from genes selected from the group consisting of IL-1α, IL-1β, IL-1ra, IL-3, IL-2, IL-4, IL-5, IL-6, IL-7, IL-8, IL-9, IL-10, IL-12 (p40), IL-12(p70), IL-13, IL-15, IL-17, EGF, Eotaxin, FGF-2, FTL-3 ligand, Fractalkine, G-CSF, GM-CSF, GRO, IFN-α2, IFN-γ, IP-10, MCP-1, MCP-3, MCD, MIP-1α, MIP-1β, PDGF-aa, PGDF-aa bb, RANTES, sCD40L, sIL2-rα, TNF-α, TNF-β, VEGF and genes listed in Tables 4, 5, 6 and 8.

[0015] Another aspect of the present invention relates to a method for determining the efficacy of a treatment for stroke in a subject. The method comprises the steps of (a) measuring the level of one or more biomarkers in a first sample obtained from the subject at a first time point; (b) measuring the level of the one or more biomarkers in a second sample obtained from the subject at a second time point, wherein the subject is under treatment at the second time point; (c) comparing the level of the one or more biomarkers at the first time point to the level of the one or more biomarkers at the second time point; and (d) determining the efficacy of the treatment based on the result of step (c). The one or more biomarkers comprise gene products expressed from genes selected from the group consisting of IL-1α, IL-1ra, IL-3, IL-2, IL-4, IL-5, IL-6, IL-7, IL-8, IL-9, IL-10, IL-12 (p40), IL-12(p70), IL-13, IL-15, IL-17, EGF, Eotaxin, FGF-2, FTL-3 ligand, Fractalkine, G-CSF, GM-CSF, GRO, IFN-α2, IFN-γ, IP-10, MCP-1, MCP-3, MCD, MIP-1α, MIP-1β, PDGF-aa, PGDF-aa bb, RANTES, sCD40L, sIL2-rα, TNF-α, TNF-β, VEGF and genes listed in Tables 4, 5, 6 and 8.

[0016] Another aspect of the present invention relates to a kit for detecting biomarkers for stroke in a biological sample. The kit comprises (a) reagents for detecting a panel of biomarkers for stroke, and (b) a instruction listing the reference range for each of the biomarkers. The panel of biomarkers comprise two or more biomarkers, and wherein the two or more biomarkers comprise gene products expressed from genes selected from the group consisting of IL-1α, IL-1β, IL-1ra, IL-3, IL-2, IL-4, IL-5, IL-6, IL-7, IL-8, IL-9, IL-10, IL-12 (p40), IL-12(p70), IL-13, IL-15, IL-17, EGF, Eotaxin, FGF-2, FTL-3 ligand, Fractalkine, G-CSF, GM-CSF, GRO, IFN-α2, IFN-γ, IP-10, MCP-1, MCP-3, MCD, MLP-1α, MIP-1β, PDGF-aa, PGDF-aa bb, RANTES, sCD40L, sIL2-rα, TNF-α, TNF-β, VEGF, NMDA receptor, neuronal specific enolase, GFAP, Apo C-III, MMP-9, D-dimer, CRP, brain natriuretic peptide, S100B and genes listed in Tables 4, 5, 6 and 8.

### BRIEF DESCRIPTION OF THE DRAWINGS

[0017] FIG. 1 shows diffusion weighted (DWI; FIGS. 1A, 1C) and T2-weighted (FIGS. 1B, 1D) MRI images collected immediately after and 24 hours following middle cerebral artery occlusion (MCAO) in a monkey subject (Monkey A035), increase in infarct size as measured by DWI 24 hours following MCAO (FIG. 1E), and infarct size as measured by DWI correlated with the motor impairment observed in the task-oriented neurological assessment (FIG. 1F).

[0018] FIG. 2 shows microarray analysis of RNA from PBMCs of non-human primates following MCAO. Blood was collected before MCAO (Pre-O) and after ischemia (1, 2 and 24 hours). Green indicates genes with low level or no expression. Red indicates genes induced following ischemia.

[0019] FIG. 3 shows levels of the cytokine monocyte chemotactic protein-1 (MCP-1) in serum increase significantly 1-2 hours after MCAO then return to baseline at 24 hours following stroke using a Luminex assay (FIG. 1A) and a Western blot analysis of serum confirming the Luminex results (FIG. 1b).

[0020] FIG. 4 shows peptidomic analysis of proteins from serum of non-human primates following MCAO. Blood was collected before MCAO (Pre-O) and after ischemia (1, 2 and 24 hours). Green indicates proteins with low level expression. Red indicates proteins increased following ischemia.

### DETAILED DESCRIPTION

[0021] The following detailed description is presented to enable any person skilled in the art to make and use the invention. For purposes of explanation, specific nomenclature is set forth to provide a thorough understanding of the present invention. However, it will be apparent to one skilled in the art that these specific details are not required to practice the invention. Descriptions of specific applications are provided only as representative examples. The present invention is not intended to be limited to the embodiments shown, but is to be accorded the widest possible scope consistent with the principles and features disclosed herein.

[0022] As used herein, the following terms shall have the following meanings:

[0023] A “biomarker,” as used herein, refers to a small molecule, protein, or nucleic acid that can be detected and measured in parts of the body like the blood or tissue whose presence or concentration reflects the presence, severity, type or progression of stroke in a subject. More generally a biomarker is anything that can be used as an indicator of a particular disease state or some other biological state of an organism. In molecular terms biomarker is the subset of markers that might be detected in a subject using genomics, proteomics technologies or imaging technologies. A biomarker may include any of, but is not limited to, a cytokine, chemokine, growth factor, enzyme, or a protein associated with thrombosis. A biomarker can also include a nucleic acid that encodes any of the above proteins or an mRNA or microRNA that is differentially expressed during or following a stroke. A biomarker may be a gene product whose presence is increased following a stroke or whose presence is decreased following a stroke.

[0024] As used herein, the term “gene product” or “expression product of a gene” refers to the transcriptional products of a gene, such as mRNAs and cDNAs encoded by the gene, and/or the translational products of a gene, such as peptides encoded by the gene, and fragments thereof.

[0025] As used herein, the term “antibody” refers to immunoglobulin molecules and immunologically active portions of immunoglobulin (Ig) molecules, i.e., “antigen binding fragments thereof” or molecules that contain an antigen binding site that specifically binds (immunoreacts with) an antigen. The term “antibody” is used in the broadest sense and specifically covers monoclonal antibodies (including full length monoclonal antibodies), polyclonal antibodies, multispecific antibodies (e.g., bispecific antibodies), and antibody fragments so long as they exhibit the desired biological activity. By “specifically bind” or “immunoreacts with” is meant that the antibody reacts with one or more antigenic determinants of the desired antigen and does not react (i.e., bind) with other polypeptides or binds at much lower affinity with other polypeptides. The term “antibody” also includes antibody fragments that comprise a portion of a full length antibody, generally the antigen binding or variable region thereof. Examples of antibody fragments include Fab, Fab′, F(ab′)2, and Fv fragments; diabodies; linear antibodies; single-chain antibody (scFv) molecules; and multispecific antibodies formed from antibody fragments. In certain embodiments of the invention, it may be desirable to use an antibody fragment, rather than an intact antibody, to increase tumor penetration, for example. In this case, it may be desirable to use an antibody fragment that has been modified by any means known in the art in order to increase its serum half life.

[0026] The term “monoclonal antibody” as used herein refers to an antibody obtained from a population of substantially homogeneous antibodies, i.e., the individual antibodies comprising the population are identical except for possible naturally occurring mutations that may be present in minor amounts. The monoclonal antibodies herein specifically include “chimeric” antibodies in which a portion of the heavy and/or light chain is identical with or homologous to corresponding sequences in antibodies derived from a particular species or belonging to a particular antibody class or subclass, while the remainder of the chain(s) is identical with or homologous to corresponding sequences in antibodies derived from another species or belonging to another antibody class or subclass, as well as fragments of such antibodies, so long as they exhibit the desired biological activity (U.S. Pat. No. 4,816,567; and Morrison et al., Proc. Natl. Acad. Sci. USA 81:6851-6855 (1984)).

[0027] The term “biological sample” refers to a sample of biological material obtained from a mammal subject, preferably a human subject, including a tissue, a tissue sample, a cell sample, peripheral blood mononuclear cells, and a biological fluid, e.g., blood, plasma, serum, saliva, urine, cerebral or spinal fluid, and lymph liquid. A biological sample may be obtained in the form of, e.g., a tissue biopsy, such as, an aspiration biopsy, a brush biopsy, a surface biopsy, a needle biopsy, a punch biopsy, an excision biopsy, an open biopsy, an incision biopsy and an endoscopic biopsy. In one embodiment, the biological sample is a blood, serum or plasma sample. In another embodiment, the biological sample is peripheral blood mononuclear cells.

[0028] An “isolate” of a biological sample (e.g., an isolate of a tissue or tumor sample) refers to a material or composition (e.g., a biological material or composition) which has been separated, derived, extracted, purified or isolated from the sample and preferably is substantially free of undesirable compositions and/or impurities or contaminants associated with the biological sample.

[0029] The term “increased level” refers to a level that is higher than a normal or control level customarily defined or used in the relevant art. For example, an increased level of immunostaining in a tissue is a level of immunostaining that would be considered higher than the level of immunostaining in a control tissue by a person of ordinary skill in the art.

[0030] The term “decreased level” refers to a level that is lower than a normal or control level customarily defined or used in the relevant art. For example, a decreased level of immunostaining in a tissue is a level of immunostaining that would be considered lower than the level of immunostaining in a control tissue by a person of ordinary skill in the art.

[0031] Ranges may be expressed herein as from “about” one particular value, and/or to “about” another particular value. When such a range is expressed, another embodiment includes from the one particular value and/or to the other particular value. Similarly, when values are expressed as approximations, by use of the antecedent “about,” it will be understood that the particular value forms another embodiment. It will be further understood that the endpoints of each of the ranges are significant both in relation to the other endpoint, and independently of the other endpoint. It is also understood that there are a number of values disclosed herein, and that each value is also herein disclosed as “about” that particular value in addition to the value itself. For example, if the value “10” is disclosed, then “about 10” is also disclosed. It is also understood that when a value is disclosed that “less than or equal to” the value, “greater than or equal to the value” and possible ranges between values are also disclosed, as appropriately understood by the skilled artisan. For example, if the value “10” is disclosed the “less than or equal to 10” as well as “greater than or equal to 10” is also disclosed.

[0032] The term “expression level of a stroke biomarker” may be measured at the transcription level, in which case the presence and/or the amount of a polynucleotide is determined, or at the translation level, in which case the presence and/or the amount of a polypeptide is determined. Stroke biomarker expression may be characterized using any suitable method.

[0033] One aspect of the present invention relates to a method for diagnosing stroke in a subject. One aspect of the present invention relates to a method for diagnosing stroke in a subject. The method comprises the steps of (a) measuring the level of one or more biomarkers in a sample from the subject; (b) comparing the level of the one or more biomarkers to a reference level of the one or more biomarkers; and (c) making a diagnosis based on the result of the comparing step.

[0034] In one embodiment, the stroke biomarker level in the biological sample is compared with a stroke marker level associated with a reference sample, such as a normal control sample. The phrase “normal control level” refers to the level of a stroke biomarker typically found in a biological sample of a population not suffering from stroke. The reference sample is preferably of a similar nature to that of the test sample. For example, if the test sample comprises patient serum, the reference sample should also be serum. The stroke biomarker level in the biological samples from control and test subjects may be determined at the same time or, alternatively, the normal control level may be determined by a statistical method based on the results obtained by analyzing the level of the stroke biomarker in samples previously collected from a control group.

[0035] In one embodiment, biomarkers are gene products expressed from genes selected from the group consisting of IL-1α, IL-1β, IL-1ra, IL-3, IL-2, IL-4, IL-5, IL-6, IL-7, IL-8, IL-9, IL-10, IL-12 (p40), IL-12(p70), IL-13, IL-15, IL-17, EGF, Eotaxin, FGF-2, FTL-3 ligand, Fractalkine, G-CSF, GM-CSF, GRO, IFN-α2, IFN-γ, IP-10, MCP-1, MCP-3, MCD, MIP-1α, MIP-1β, PDGF-aa, PGDF-aa bb, RANTES, sCD40L, sIL2-rα, TNF-α, TNF-β, VEGF, NMDA receptor, neuronal specific enolase, GFAP, Apo C-III, MMP-9, D-dimer, CRP, brain natriuretic peptide, S100B and genes listed in Tables 4, 5, 6 and 8.

[0036] In a related embodiment, the biomarkers are expression products of cytokine genes, chemokine genes or growth factor genes. In a further related embodiment, the cytokine, chemokine or growth factor genes are selected from genes encoding IL-1α, IL-1β, IL-1ra, IL-2, IL-3, IL-4, IL-5, IL-6, IL-7, IL-8, IL-9, IL-10, IL-12 (p40), IL-12 (p70), IL-13, IL-15, IL-17, epidermal growth factor (EGF), Eotaxin, FGF-2, FTL-3 ligand, Fractalkine, G-CSF, GM-CSF, GRO, IFN-α2, IFN-γ, IP-10, monocyte chemotactic protein-1 (MCP-1), MCP-3, MCD, MIP-1β, PDGF-aa, PDGF-aa bb, RANTES, sCD40L, sIL2-rα, TNF-α, TNF-β, and VEGF.

[0037] In certain embodiments, the biomarkers are protein or peptide markers.

[0038] In certain other embodiments, the biomarkers are nucleic acid biomarkers. In certain related embodiments, the nucleic acid biomarkers are DNA or RNA biomarkers. In certain embodiments, expression of the stroke biomarkers is determined at the mRNA level by quantitative RT-PCR, Northern blot or other methods known to a person of ordinary skill in the art.

[0039] In some embodiments, a panel of multiple biomarkers is measured in step (a). Multimarker panels improve the diagnostic sensitivity and specificity of individual biomarkers. For example, by simultaneously targeting different components of the ischemic cascade, a panel of biomarkers can distinguish patients with acute stroke from age and gender-matched control subjects and establish the timing and severity of the stroke. In some embodiments, multimarker panels include biomarkers that indicate stroke incidence, timing after ischemia and severity of neuronal damage. In other embodiments, the panels would also include markers to confirm or rule out hemorrhage and transient ischemic attack (e.g. irreversible neuronal damage).

[0040] In other embodiments, step (a) includes measuring a panel of three or more biomarkers in the sample from the subject. In certain embodiments, the panel comprises at least one immediate early stroke biomarker (differentially expressed at 1 hour post-stroke), at least one early stroke biomarker (differentially expressed at 2 hour post-stroke) and at least one late stroke biomarker (differentially expressed at 24 hour post-stroke). In certain other embodiments, the panel comprises at least two immediate early stroke biomarker (differentially expressed at 1 hour post-stroke), at least two early stroke biomarker (differentially expressed at 2 hour post-stroke) and at least two late stroke biomarker (differentially expressed at 24 hour post-stroke). In certain other embodiments, the panel comprises at least three immediate early stroke biomarker (differentially expressed at 1 hour post-stroke), at least three early stroke biomarker (differentially expressed at 2 hour post-stroke) and at least three late stroke biomarker (differentially expressed at 24 hour post-stroke).

[0041] Examples of immediate early stroke biomarkers include, but are not limited to, gene products of CD163, PKC delta, pyruvate kinase, muscle (PKM2), thyroid hormone receptor associated protein 2, thyroid hormone receptor associated protein 5, nod-like receptor (NLR) family, pyrin domain containing 1, pancreatic ribonuclease (Rnase 1), cytochrome b-245, beta polypeptide, MCP-1, as well as the genes listed in Table 4.

[0042] Examples of early stroke biomarkers include, but are not limited to, gene products of CD163, PKC delta, AKT1 substrate 1 (proline-rich) isoform 1, Cmtm3, WD repeat 19 (WDR19), alpha-2 type IX collagen, thyroid hormone receptor associated protein 2, thyroid hormone receptor associated protein 5, nod-like receptor (NLR) family, pyrin domain containing 1, pancreatic ribonuclease (Rnase 1), complement factor H isoform a precursor, MCP-1, as well as the genes listed in Table 5.

[0043] Examples of late stroke biomarkers include, but are not limited to, gene products of NOD9 (NLRK1), aspartyl-tRNAsynthetase, lymphocyte cytosolic protein 1 (L-plastin), chitinase 1 (chitotriosidase), proteasome subunit alpha type 1(PSMA4), PKC delta, Cmtm3, WDR19, alpha-2 type IX collagen, PKM2, thyroid hormone receptor associated protein 2, thyroid hormone receptor associated protein 5, nod-like receptor family, pyrin domain containing 1, pancreatic ribonuclease (Rnase 1), cytochrome b-245, beta polypeptide, complement factor H isoform a precursor, as well as the genes listed in Table 6.

[0044] In certain embodiments, the biomarker panel further comprises one or more stroke incidence biomarkers that can only be detected in blood after stroke. Examples of such biomarkers include, but are not limited to, alpha-2-plasmin inhibitor, WDR19, alpha-2 type IX collagen, PKM2, thyroid hormone receptor associated protein 2, thyroid hormone receptor associated protein 5, nod-like receptor family, pyrin domain containing 1 pancreatic ribonuclease (Rnase 1), and cytochrome b-245, beta polypeptide S100-B.

[0045] In certain other embodiments, the biomarker panel further comprises one or more stroke severity biomarkers whose levels increase in blood over time after stroke. Examples of such biomarkers include, but are not limited to, PKC delta, chemokine-like superfamily 3 (Cmtm3), and NLR family, pyrin domain containing 1.

[0046] In other embodiments, the above-described biomarker panel may further comprise one or more neuronal injury markers, such as gene products of NMDA receptor and neuronal specific enolase.

[0047] In other embodiments, the above-described biomarker panel may further comprise one or more emorrhagic stroke markers, such as GFAP, Apo C-III and MMP-9.

[0048] In other embodiments, the above-described biomarker panel may further comprise one or more biomarkers selected from the group consisting of D-dimer, CRP, brain natriuretic peptide (BNP) and S1000B.

[0049] In other embodiments, the biomarker panel comprises at least one expression product from the genes listed in Table 4, at least one expression product from the genes listed in Table 5 and at least one expression product from the genes listed in Table 6. In other embodiments, the biomarker panel comprises at least three expression product from the genes listed in Table 4, at least three expression product from the genes listed in Table 5 and at least three expression product from the genes listed in Table 6. In other embodiments, the biomarker panel comprises at least five expression product from the genes listed in Table 4, at least five expression product from the genes listed in Table 5 and at least five expression product from the genes listed in Table 6. These biomarker panels may further include expression products from the stroke severity biomarkers, neuronal injury markers, and emorrhagic stroke markers.

[0050] In some embodiments, the biomarkers and biomarker panels are specific for ischemic stroke. In related embodiments, the ischemic stroke is large vessel ischemic stroke.

[0051] In another embodiment, the biomarkers are detected in a tissue sample.

[0052] In certain other embodiments, the biomarkers are detected in a body fluid. As used hereinafter, the term “body fluid” refers to blood, blood plasma or serum, urine, saliva and cerebrospinal fluid. In a related embodiment, the biomarkers are detected in cells obtained from a body fluid, for example, peripheral blood mononuclear cells isolated from a blood sample.

[0053] In another embodiment, the measuring step includes measuring two or more biomarkers in the sample from the subject.

[0054] In another embodiment, the measuring step includes measuring three or more biomarkers in the sample from the subject.

[0055] In another embodiment, the measuring step includes measuring four or more biomarkers in the sample from the subject.

[0056] In another embodiment, the measuring step includes measuring five, 10, 15, 20, 25 or more biomarkers in the sample from the subject.

[0057] Another aspect of the present invention is a method for determining disease progression in a subject after a stroke. The method comprises the steps of (a) measuring the level of one or more biomarkers in a sample from the subject receiving the treatment and (b) determining the disease progression based on the level of the one or more biomarkers in the sample.

[0058] Another aspect of the present invention relates to a method for determining disease progression in a subject after a stroke. The method comprises the steps of (a) measuring the level of one or more biomarkers in a first sample obtained from the subject at a first time point; (b) measuring the level of the one or more biomarkers in a second sample obtained from the subject at a second time point; (c) comparing the level of the one or more biomarkers at the first time point to the level of the one or more biomarkers at the second time point; and (d) determining the disease progression between the first and the second time point based on the result of step (c).

[0059] Another aspect of the present invention relates to a method for determining the efficacy of a treatment for stroke in a subject. The method comprises the steps of (a) measuring the level of one or more biomarkers in a first sample obtained from the subject at a first time point; (b) measuring the level of the one or more biomarkers in a second sample obtained from the subject at a second time point, wherein the subject is under treatment at the second time point; (c) comparing the level of the one or more biomarkers at the first time point to the level of the one or more biomarkers at the second time point; and (d) determining the efficacy of the treatment based on the result of step (c).

### Detection of Biomarkers for Stroke in a Subject

[0060] Methods for detecting stroke biomarkers in a tissue or body fluid sample have many applications. For example, one or more biomarkers can be measured to aid in the diagnosis of stroke. In another example, the methods for detection of the biomarkers can be used to determine the severity of a stroke. In another example, the methods for detection of the biomarkers can be used to determine the time elapsed following the occurrence of a stroke. In another example, the methods for detection of the biomarkers can be used to determine what type of stroke a subject experienced. For example, differences in the types of stroke biomarkers, and/or the quantity of a particular biomarker in the subject may elucidate whether the subject experienced a hemorrhagic stroke or an ischemic stroke, or whether an ischemic stroke was a large vessel ischemic stroke. In yet another example, the methods for detecting markers can be used to monitor the progression of stroke in a subject. In still another example, the methods for detection of the biomarkers can be used to monitor a subject's response to treatment or to determine the type of treatment that should be used for that subject. In still another example, biomarkers can be used to detect whether a subject has experienced transient ischemia, such as that associated with a reperfusion injury. In a further example, biomarkers can elucidate whether a subject has experienced a permanent stroke or a transient stroke. In another example, biomarkers can be used to assess the effectiveness of a neuroprotective drug or compound.

[0061] In order to detect stroke biomarkers in a subject, a cerebrospinal fluid, blood or serum sample is contacted with at least one antibody specific for a biomarker for stroke. Alternatively, a sample can be obtained by lysing the PBMCs by methods known in the art and contacting the lysate with at least one antibody specific for a biomarker for stroke. In addition, biomarkers may also be detected in saliva, urine, tears, and specific subsets of leukocytes, such as B lymphocytes, T lymphocytes, granulocytes (such as neutrophils), and monocytes.

[0062] Exemplary biomarkers for stroke include gene products expressed from genes selected from the group consisting of IL-1α, IL-1β, IL-1ra, IL-3, IL-2, IL-4, IL-5, IL-6, IL-7, IL-8, IL-9, IL-10, IL-12 (p40), IL-12(p70), IL-13, IL-15, IL-17, EGF, Eotaxin, FGF-2, FTL-3 ligand, Fractalkine, G-CSF, GM-CSF, GRO, IFN-α2, IFN-γ, IP-10, MCP-1, MCP-3, MCD, MIP-1α, MIP-1β, PDGF-aa, PGDF-aa bb, RANTES, sCD40L, sIL2-rα, TNF-α, TNF-β, VEGF and genes listed in Tables 4, 5, 6 and 8.

[0063] Stroke biomarkers can be detected and/or quantified using any of suitable immunological binding assays known in the art. Useful assays include, for example, an enzyme immune assay (EIA) such as enzyme-linked immunosorbent assay (ELISA), a radioimmunoassay (RIA), a Western blot assay, a slot blot assay or a dipstick assay.

[0064] Generally, a sample from a subject can be contacted with an antibody that specifically binds a stroke biomarker. Optionally, the antibody can be fixed to a solid support to facilitate washing and subsequent isolation of the complex, prior to contacting the antibody with a sample. Examples of solid supports include glass or plastic in the form of a microtiter plate, a stick, a bead, or a microbead. Examples of solid supports encompassed herein include those formed partially or entirely of glass (e.g., controlled pore glass), polysaccharides (e.g., agarose), polyacrylamides, silicones, and plastics such as polystyrene, polypropylene and polyvinyl alcohol. The sample can be diluted with a suitable diluant or eluant before contacting the sample to the antibody.

[0065] After incubating the sample with antibodies, the mixture is washed and the antibody-biomarker complex formed can be detected. This can be accomplished by incubating the washed mixture with a detection reagent. This detection reagent may be a second antibody which is labeled with a detectable label, for example. Exemplary detectable labels include magnetic beads (e.g., DYNABEADS™), fluorescent dyes, radiolabels, enzymes (for example, horse radish peroxidase, alkaline phosphatase and others commonly used in an ELISA), and colorimetric labels such as colloidal gold or colored glass or plastic beads. Alternatively, the biomarker in the sample can be detected using an indirect assay, wherein, for example, a second, labeled antibody is used to detect bound biomarker-specific antibody, and/or in a competition or inhibition assay wherein, for example, a monoclonal antibody which binds to a distinct epitope of the marker is incubated simultaneously with the mixture.

[0066] Immunoassays can be used to determine presence or absence of a stroke biomarker in a sample as well as the quantity of a biomarker in a sample. First, a test amount of a biomarker in a sample can be detected using the immunoassay methods described above. If a marker is present in the sample, it will form an antibody-marker complex with an antibody that specifically binds the marker under suitable incubation conditions described above. The amount of an antibody-marker complex can be determined by comparing to a standard. A standard can be a known compound or another protein known to be present in a sample, for example. As noted above, the test amount of marker need not be measured in absolute units, as long as the unit of measurement can be compared to a control.

### Enzyme-Linked Immunosorbent Assay (ELISA)

[0067] In certain embodiments, the stroke biomarkers are detected using enzyme-linked immunosorbent assay (ELISA) which is typically carried out using antibody coated assay plate or wells. Commonly used ELISA assay employs either a sandwich immunoassay or a competitive binding immunoassay.

[0068] Briefly, a sandwich immunoassay is a method using two antibodies, which bind to different sites on the antigen or ligand. The primary antibody, which is highly specific for the antigen, is attached to a solid surface. The antigen is then added followed by addition of a second antibody referred to as the detection antibody. The detection antibody binds the antigen to a different epitope than the primary antibody. As a result the antigen is ‘sandwiched’ between the two antibodies. The antibody binding affinity for the antigen is usually the main determinant of immunoassay sensitivity. As the antigen concentration increases the amount of detection antibody increases leading to a higher measured response. The standard curve of a sandwich-binding assay has a positive slope. To quantify the extent of binding different reporters can be used. Typically an enzyme is attached to the secondary antibody which must be generated in a different species than primary antibodies (i.e. if the primary antibody is a rabbit antibody than the secondary antibody would be an anti-rabbit from goat, chicken, etc., but not rabbit). The substrate for the enzyme is added to the reaction that forms a colorimetric readout as the detection signal. The signal generated is proportional to the amount of target antigen present in the sample.

[0069] The antibody linked reporter used to measure the binding event determines the detection mode. A spectrophotometric plate reader may be used for colorimetric detection. Several types of reporters have been developed in order to increase sensitivity in an immunoassay. For example, chemiluminescent substrates have been developed which further amplify the signal and can be read on a luminescent plate reader. Also, a fluorescent readout where the enzyme step of the assay is replaced with a fluorophor tagged antibody is becoming quite popular. This readout is then measured using a fluorescent plate reader.

[0070] A competitive binding assay is based upon the competition of labeled and unlabeled ligand for a limited number of antibody binding sites. Competitive inhibition assays are often used to measure small analytes. These assays are also used when a matched pair of antibodies to the analyte does not exist. Only one antibody is used in a competitive binding ELISA. This is due to the steric hindrance that occurs if two antibodies would attempt to bind to a very small molecule. A fixed amount of labeled ligand (tracer) and a variable amount of unlabeled ligand are incubated with the antibody. According to law of mass action the amount of labeled ligand is a function of the total concentration of labeled and unlabeled ligand. As the concentration of unlabeled ligand is increased, less labeled ligand can bind to the antibody and the measured response decreases. Thus the lower the signal, the more unlabeled analyte there is in the sample. The standard curve of a competitive binding assay has a negative slope.

### Microbeads

[0071] In certain other embodiments, the stroke biomarkers are detected using antibody coated microbeads. In some embodiments, the microbeads are magnetic beads. In other embodiments, the beads are internally color-coded with fluorescent dyes and the surface of the bead is tagged with an anti-stroke biomarker antibody that can bind a stroke biomarker in a test sample. The stroke biomarker, in turn, is either directly labeled with a fluorescent tag or indirectly labeled with an anti-marker antibody conjugated to a fluorescent tag. Hence, there are two sources of color, one from the bead and the other from the fluorescent tag. Alternatively, the beads can be internally coded by different sizes.

[0072] By using a blend of different fluorescent intensities from the two dyes, as well as beads of different sizes, the assay can measure up to hundreds of different stroke biomarkers. During the assay, a mixture containing the color/size-coded beads, fluorescence labeled anti-marker antibodies, and the sample are combined and injected into an instrument that uses precision fluidics to align the beads. The beads then pass through a laser and, on the basis of their color or size, either get sorted or measured for color intensity, which is processed into quantitative data for each reaction.

[0073] When samples are directly labeled with fluorophores, the system can read and quantitate only fluorescence on beads without removing unbound fluorophores in solution. The assays can be multiplexed by differentiating various colored or sized beads. Real time measurement is achievable when a sample is directly required for unlabeled samples. Standard assay steps include incubation of a sample with anti-marker antibody coated beads, incubation with biotin or fluorophore-labeled secondary antibody, and detection of fluorescence signals. Fluorescent signals can be developed on bead (by adding streptavidin-fluorophore conjugates for biotinylated secondary antibody) and read out by a bead analyzer. Depending on the anti-marker immobilized on the bead surface, a bead-based immunoassay can be a sandwich type or a competitive type immunoassay.

### Test Stick

[0074] In some other embodiments, the stroke biomarkers in a liquid biosample are detected using a test stick or dip stick. The test stick typically contains a fluid impermeable housing and a fluid permeable “stick” having one or more detection zones. In one embodiment, each detection zone contains a dried binding reagent that binds to a stroke biomarker in a biosample. In another embodiment, the dried binding reagent is a labeled binding reagent. In another embodiment, the test stick may further comprise a control zone to indicate that the assay test has been carried out satisfactorily, namely the reagents were present in the test stick and that they become mobilized during running the test and have been transported along the flow path. The control zone can also indicate that the reagents within the device are capable of immunochemical interactions, confirming the chemical integrity of the device. This is important when considering the storage and shipment of the device under desiccated conditions within a certain temperature range. The control zone is typically positioned downstream from the detection zone(s) and may, for example, comprise an immobilized binding reagent for a labeled binding reagent. The labeled binding reagent may be present in a mobilizable form upstream from the control zone and detection zone. The labeled binding reagent may be the same or different to the labeled binding reagent for the stroke biomarker.

[0075] In one embodiment, the test stick comprise a porous sample receiver in fluid connection with and upstream from one or more flow-paths. The porous sample receiver may be common to all assays. Thus a fluid sample applied to the common sample application region of the device is able to travel along the one or more flow-paths to the respective detection zones. The porous sample receiver may be provided within a housing or may at least partially extend out of said housing and may serve for example to collect a body fluid. The porous sample receiver may also act as a fluid reservoir. The porous sample receiving member can be made from any bibulous, porous or fibrous material capable of absorbing liquid rapidly. The porosity of the material can be unidirectional (i.e. with pores or fibers running wholly or predominantly parallel to an axis of the member) or multidirectional (omnidirectional, so that the member has an amorphous sponge-like structure). Porous plastics material, such as polypropylene, polyethylene (preferably of very high molecular weight), polyvinylidene fluoride, ethylene vinylacetate, acrylonitrile and polytetrafluoro-ethylene can be used. Other suitable materials include glass-fiber.

[0076] If desired, an absorbent “sink” can be provided at the distal end of the carrier material. The absorbent sink may comprise, for example, Whatman 3MM chromatography paper, and should provide sufficient absorptive capacity to allow any unbound labeled binding reagent to wash out of the detection zone(s). As an alternative to such a sink it can be sufficient to have a length of porous solid phase material which extends beyond the detection zone(s).

[0077] Following the application of a binding reagent to a detection zone, the remainder of the porous solid phase material may be treated to block any remaining binding sites. Blocking can be achieved by treatment for example with protein (e.g. bovine serum albumin or milk protein), or with polyvinyl alcohol or ethanolamine, or combinations thereof. To assist the free mobility of the labeled binding reagent when the porous carrier is moistened with the sample, the porous carrier may further comprise a sugar such as sucrose or lactose and/or other substances, such as polyvinyl alcohol (PVA) or polyvinyl pyrrolidone (PVP). Such material may be deposited, for example, as an aqueous solution in the region to which the labeled binding reagent is to be applied. Such materials could be applied to the porous carrier as a first application followed by the application of the label; alternatively, such materials could be mixed with the label and applied to the porous carrier or combinations of both. Such material may be deposited upstream from or at the labeled binding reagent.

[0078] Alternatively, the porous carrier may not be blocked at the point of manufacture; instead the means for blocking the porous carrier are included in a material upstream from the porous carrier. On wetting the test strip, the means for blocking the porous carrier are mobilized and the blocking means flow into and through the porous carrier, blocking as the flow progresses. The blocking means include proteins such as BSA and casein as well as polymers such as PVP, PVA as well as sugars and detergents such as Triton-X100. The blocking means could be present in the macroporous carrier material.

[0079] The dried binding reagents may be provided on a porous carrier material provided upstream from a porous carrier material comprising the detection zone. The upstream porous carrier material may be macroporous. The macroporous carrier material should be low or non-protein-binding, or should be easily blockable by means of reagents such as BSA or PVA, to minimize non-specific binding and to facilitate free movement of the labeled reagent after the macroporous body has become moistened with the liquid sample. The macroporous carrier material can be pre-treated with a surface active agent or solvent, if necessary, to render it more hydrophilic and to promote rapid uptake of the liquid sample. Suitable materials for a macroporous carrier include plastic materials such as polyethylene and polypropylene, or other materials such as paper or glass-fiber. In the case that the labeled binding reagent is labeled with a detectable particle, the macroporous body may have a pore size at least ten times greater than the maximum particle size of the particle label. Larger pore sizes give better release of the labeled reagent. As an alternative to a macroporous carrier, the labeled binding reagent may be provided on a non-porous substrate provided upstream from the detection zone, said non-porous substrate forming part of the flow-path.

[0080] In another embodiment, the test stick may further comprise a sample receiving member for receiving the fluid sample. The sample receiving member may extend from the housing.

[0081] The housing may be constructed of a fluid impermeable material. The housing will also desirably exclude ambient light. The housing will be considered to substantially exclude ambient light if less than 10%, preferably less than 5%, and most preferably less than 1%, of the visible light incident upon the exterior of the device penetrates to the interior of the device. A light-impermeable synthetic plastics material such as polycarbonate, ABS, polystyrene, polystyrol, high density polyethylene, or polypropylene containing an appropriate light-blocking pigment is a suitable choice for use in fabrication of the housing. An aperture may be provided on the exterior of the housing which communicates with the assay provided within the interior space within the housing. Alternatively, the aperture may serve to allow a porous sample receiver to extend from the housing to a position external from the housing.

### Microarray

[0082] In other embodiments, the stroke biomarkers are detected by a protein microarray containing immobilized stroke biomarker-specific antibodies on its surface. The microarray can be used in a “sandwich” assay in which the antibody on the microarray captures a stroke biomarker in the test sample and the captured marker is detected by a labeled secondary antibody that specifically binds to the captured marker. In a preferred embodiment, the secondary antibody is biotinylated or enzyme-labeled. The detection is achieved by subsequent incubation with a streptavidin-fluorophore conjugate (for fluorescence detection) or an enzyme substrate (for colorimetric detection).

[0083] Typically, a microarray assay contains multiple incubation steps, including incubation with the samples and incubation with various reagents (e.g., primary antibodies, secondary antibodies, reporting reagents, etc.). Repeated washes are also needed between the incubation steps. In one embodiment, the microarray assays is performed in a fast assay mode that requires only one or two incubations. It is also conceivable that the formation of a detectable immune complex (e.g., a captured stroke biomarker/anti-marker antibody/label complex) may be achieved in a single incubation step by exposing the protein microarray to a mixture of the sample and all the necessary reagents. In one embodiment, the primary and secondary antibodies are the same antibody.

[0084] In another embodiment, the protein microarray provides a competitive immunoassay. Briefly, a microarray comprising immobilized anti-marker antibodies is incubated with a test sample in the presence of a labeled stroke biomarker standard. The labeled stroke biomarker competes with the unlabeled stroke biomarker in the test sample for the binding to the immobilized antigen-specific antibody. In such a competitive setting, an increased concentration of the specific stroke biomarker in the test sample would lead to a decreased binding of the labeled stroke biomarker standard to the immobilized antibody and hence a reduced signal intensity from the label.

[0085] The microarray can be processed in manual, semi-automatic or automatic modes. Manual mode refers to manual operations for all assay steps including reagent and sample delivery onto microarrays, sample incubation and microarray washing. Semi-automatic modes refer to manual operation for sample and reagent delivery onto microarray, while incubation and washing steps operate automatically. In an automatic mode, three steps (sample/reagent delivery, incubation and washing) can be controlled by a computer or an integrated breadboard unit with a keypad. For example, the microarray can be processed with a ProteinArray Workstation (PerkinElmer Life Sciences, Boston, Mass.) or Assay 1200™. Workstation (Zyomyx, Hayward, Calif.). Scanners by fluorescence, colorimetric and chemiluminescence, can be used to detect microarray signals and capture microarray images. Quantitation of microarray-based assays can also be achieved by other means, such as mass spectrometry and surface plasma resonance. Captured microarray images can be analyzed by stand-alone image analysis software or with image acquisition and analysis software package. For example, quantification of an antigen microarray can be achieved with a fluorescent PMT-based scanner—ScanArray 3000 (General Scanning, Watertown, Mass.) or colorimetric CCD-based scanner—VisionSpot (Allied Biotech, Ijamsville, Md.). Typically, the image analysis would include data acquisition and preparation of assay report with separate software packages. To speed up the whole assay process from capturing an image to generating an assay report, all the analytical steps including image capture, image analysis, and report generation, can be confined in and/or controlled by one software package. Such an unified control system would provide the image analysis and the generation of assay report in a user-friendly manner.

### Implantable Biosensors

[0086] In at-risk subjects, the stroke biomarkers may be detected using implantable biosensors. Biosensors are electronic devices that produce electronic signals as the result of biological interactions. In one embodiment, the biosensors use antibodies, receptors, nucleic acids, or other members of a binding pair to bind with a stroke biomarker, which is typically the other member of the binding pair. Biosensors may be used with a blood sample to determine the presence of a stroke biomarker without the need for sample preparation and/or separation steps typically required for the automated immunoassay systems.

[0087] In one embodiment, the sensor is a nanoscale device. The sensor system includes a biological recognition element attached to a nanowire and a detector that is capable of determining a property associated with the nanowire. The biological recognition element is one member of a binding pair (e.g., a receptor of the stroke biomarker or an anti-stroke biomarker antibody) where the stroke biomarker being measured is the other member of the binding pair. Preferably, the nanowire sensor includes a semiconductor nanowire with an exterior surface formed thereon to form a gate electrode and a first end in electrical contact with a conductor to form a source electrode and a second end in contact with a conductor to form a drain electrode.

[0088] In one embodiment the sensor is a field effect transistor comprising a substrate formed of an insulating material, a source electrode, a drain electrode and a semiconductor nanowire disposed there between with a biological recognition element attached on a surface of the nanowire. When a binding event occurs between the biological recognition element and its specific binding partner, a detectable change is caused in a current-voltage characteristic of the field effect transistor.

[0089] In another embodiment, the sensor system includes an array of sensors. One or more of the sensors in the array is associated with a protective member that prevents the associated sensor from interacting with the surrounding environment. At a selected time, the protective member may be disabled, thereby allowing the sensor to begin operating to interact with the surrounding fluid or tissue so that the biological recognition element can interact with the other member of its binding pair if that pair member is present.

[0090] In another embodiment, the protective member is formed of a conductive material that can oxidize, is biocompatible, bio-absorbable, and that may be dissolved in solution such as blood upon application of an electric potential. For example, a sensor may be formed within a well of a substrate that is capped by a conductive material such as a biocompatible metal or an electrically-erodible polymer. In another embodiment, the protective member is formed using a material that dissolves over a predetermined period of time. Implantable biosensors are described in, for example, US Patent Application Publication No. 20050049472, which is incorporated herein by reference.

### Determination of Standard Value, Specificity and Sensitivity

[0091] In the present invention, the standard expression level of a stroke biomarker, such as the concentration of a stroke biomarker in a biological sample, can be determined statistically. For example, the concentration of a stroke biomarker in a biological sample in healthy individuals can be measured to determine the standard concentration of said stroke biomarker statistically. When a statistically sufficient population can be gathered, a value in the range of twice or three times the standard deviation (S.D.) from the mean value is often used as the standard value. Therefore, values corresponding to the mean value+2×.S.D. or mean value+3×S.D. may be used as standard values. The standard values set as described theoretically comprise 90% and 99.7% of healthy individuals, respectively.

[0092] Alternatively, standard values can also be set based on the actual expression level (e.g., blood concentration of a stroke biomarker) in stroke patients. Generally, standard values set this way minimize the percentage of false positives, and are selected from a range of values satisfying conditions that can maximize detection sensitivity. Herein, the percentage of false positives refers to a percentage, among healthy individuals, of patients whose concentration of a stroke biomarker in a biological sample is judged to be higher or lower than a standard value. On the contrary, the percentage, among healthy individuals, of patients whose concentration of said stroke biomarker in a biological sample is judged to be lower or higher, respectively, than a standard value indicates specificity. That is, the sum of the false positive percentage and the specificity is always 1. The detection sensitivity refers to the percentage of patients whose concentration of a stroke biomarker in a biological sample is judged to deviate from a standard value, among all stroke patients within a population of individuals for whom the presence of stroke has been determined.

[0093] As used herein, the term “test sensitivity” is the ability of a screening test to identify stroke, also characterized by being a test with high sensitivity has few false negatives, additionally a test independent of stroke prevalence. The test sensitivity is calculated as true positive tests per total affected patients tested, expressed as a percentage. Test specificity” refers to a screening test which is correctly negative in the absence of stroke, has high specificity and few false positives, is independent of stroke prevalence. The test specificity is calculated as true negative tests per unaffected individuals tested, expressed as a percentage.

[0094] The term “PPV” (Positive Predictive Value) is the percent of patients with a positive test having had a stroke, and thus assesses reliability of positive test. Calculation:

PPV=(True positive)/(True+False positives). 1

[0095] The term “NPV” (Negative Predictive Value) refers to patients with negative test that have not had a stroke, and assesses reliability of negative test. Calculation:

NPV=(True negative)/(true and false negatives). 2

[0096] As the relationship shown above indicates, each of the values for sensitivity, specificity, positive predictive value, and negative predictive value, which are indexes for evaluating the diagnostic accuracy, varies depending on the standard value for judging the level of the concentration of a stroke biomarker in a biological sample.

[0097] A standard value is usually set such that the false positive ratio is low and the sensitivity is high. However, as also apparent from the relationship shown above, there is a trade-off between the false positive ratio and sensitivity. That is, if the standard value is decreased, the detection sensitivity increases. However, since the false positive ratio also increases, it is difficult to satisfy the conditions to have a low false positive ratio. Considering this situation, for example, values that give the following predicted results may be selected as the preferable standard values in the present invention: (1) standard values for which, the false positive ratio is 50% or less (that is, standard values for which the specificity is not less than 50%) and (2) standard values for which the sensitivity is not less than 20%.

[0098] The standard values can be set using receiver operating characteristic (ROC) curve. An ROC curve is a graph that shows the detection sensitivity on the vertical axis and the false positive ratio on the horizontal axis. A ROC curve can be obtained by plotting the changes in the sensitivity and the false positive ratio, which were obtained after continuously varying the standard value for determining the high/low degree of the concentration of a stroke biomarker in a biological sample.

[0099] The “standard value” for obtaining the ROC curve is a value temporarily used for the statistical analyses. The standard value for obtaining the ROC curve can generally be continuously varied within a range that allows to cover all selectable standard values. For example, the standard value can be varied between the smallest and largest measured stroke biomarker values in biological samples from an analyzed population.

[0100] Based on the obtained ROC curve, a preferable standard value to be used in the present invention can be selected from a range that satisfies the above-mentioned conditions. Alternatively, a standard value can be selected based on a ROC curve produced by varying the standard values from a range that comprises most of the measured stroke biomarker level in a biological sample.

### Kits

[0101] In yet another aspect, the invention provides kits for detecting the stroke biomarkers of the present invention. For example, the kits may contain reagents for the detection of one or more biomarkers and a list of reference levels of the one or more biomarkers.

[0102] In certain embodiments, the biomarker are gene products expressed from genes selected from the group consisting of IL-1α, IL-1β, IL-1ra, IL-3, IL-2, IL-4, IL-5, IL-6, IL-7, IL-8, IL-9, IL-10, IL-12 (p40), IL-12(p70), IL-13, IL-15, IL-17, EGF, Eotaxin, FGF-2, FTL-3 ligand, Fractalkine, G-CSF, GM-CSF, GRO, IFN-α2, IFN-γ, IP-10, MCP-1, MCP-3, MCD, MIP-1α, MIP-1β, PDGF-aa, PGDF-aa bb, RANTES, sCD40L, sIL2-rα, TNF-α, TNF-β, VEGF and genes listed in Tables 4, 5, 6 and 8.

[0103] In other embodiments, the kit comprises reagents for the detection of a biomarker panel. In certain embodiments, the biomarker panel comprises two or more biomarkers. In certain other embodiments, the biomarker panel comprises five or more biomarkers. In certain other embodiments, the biomarker panel comprises ten or more biomarkers. In certain other embodiments, the biomarker panel comprises twenty or more biomarkers.

[0104] The kits of the invention have many applications. For example, the kits can be used to diagnose whether a subject has had a stroke, how severe that stroke was, and how long ago the subject had the stroke. In another example, the kits can be used to determine what type of stroke a subject experienced. For example, differences in the types of stroke biomarkers, and/or the quantity of a particular biomarker in the subject may elucidate whether the subject experienced a hemorrhagic stroke or an ischemic stroke, or whether an ischemic stroke was a large vessel ischemic stroke. In still another example, the kit can be used to monitor the progression of stroke in a subject or a subject's response to treatment or to determine the type of treatment that should be used for that subject.

[0105] In one embodiment, a kit comprises (a) an antibody that specifically binds to a stroke biomarker; and (b) a detection reagent. Such kits can be prepared from the materials described above, and the previous discussion regarding the materials (e.g., antibodies, detection reagents, immobilized supports, etc.) is fully applicable to this. In a specific embodiment, the antibody is a monoclonal antibody. The detecting means of the kit may include a second, labeled monoclonal antibody. Alternatively, or in addition, the detecting means may include a labeled, competing antigen. In some embodiments, the kit may further comprise instructions for suitable operation parameters in the form of a label or a separate insert.

[0106] Optionally, the kit may further comprise a standard or control information so that the test sample can be compared with the control information standard to determine if the test amount of a marker detected in a sample is a diagnostic amount consistent with a diagnosis of stroke in general, the type of stroke, degree of severity of the stroke, time elapsed since the occurrence of the stroke, progression of the stroke, and/or effect of treatment on the subject.

[0107] Optionally, the kit can further comprise instructions for suitable operational parameters in the form of a label or a separate insert. For example, the kit may have standard instructions informing a consumer how to wash the probe after a sample is contacted on the probe. In another example, the kit may have instructions for pre-fractionating a sample to reduce complexity of proteins in the sample. In another example, the kit may have instructions for automating the fractionation or other processes.

[0108] The present invention is further illustrated by the following examples which should not be construed as limiting. The contents of all references, patents and published patent applications cited throughout this application, as well as the Figures and Tables, are incorporated herein by reference.

### Example 1

### Determination of Biomarkers in a Non-Human Primate Model of Stroke

[0109] Three juvenile healthy Specific Pathogen Free (SPF) rhesus monkeys (Macaca mulata), weighing 4.5-6.5 kg were screened for metabolic diseases by complete blood count and serum chemistry analysis. Coagulation evaluation tests were also performed. Animals were fasted 12 hours prior to surgery. Anesthesia was induced by ketamine (10-20 mg/kg IM). Atropine (O.Q4 mg/kg) was administered IM as part of the anesthesia pre-medications. Anesthesia was maintained with propofol (0.3-0.4 mg/kg/min) in a constant rate into the saphenous vein. A 3.0-3.5 mmID cuffed endotracheal tube was placed. Animals were connected to monitoring equipment (BM5 VET, Bionet America, CA) which included EKG, pulse oxymeter, capnographer, HR, RR, rectal temperature, and placed on an Air Warmer (Bair Hugger; Arizant, Eden Prairie, Minn.). Physiologic variables were kept within the normal range. Following sterile preparation with betadine and alcohol scrubbing of the monkey's inguinal area, the area was infiltrated with lidocaine 2% to prevent vasospasm of the femoral artery as well as local anesthesia. The Seldinger technique was used, which consists of an incision in the groin near the pulsation wave of the femoral artery. Using a Micropuncture Introducer Set 21G angiography puncture needle (Cook Medical, Bloomington, Ind.), a guide wire was introduced and a 4 fr. femoral sheath placed, while irrigating with a normal saline pressure bag. A 4 diagnostic catheter (Terumo, Somerset, N.J.) was introduced over a 0.035 fr. guide wire (Terumo, Somerset, N.J.) and navigated the abdominal thoracic aorta until the aortic arch was reached, and from there the brachiocephalic trunk, common carotid artery and internal carotid artery were catheterized. Confirmation of catheter placement was done by injection of contrast material (Conray; Covidien, Hazelwood, Mo.) under digital angiographic control by using a C-Arm Fluoroscopy system. A Rapid Transit Microcatheter (Cordis, Bridgewater, N.J.) with a Traxcess 0.014 guiding wire (Terumo, Somerset, N.J.) was introduced and navigated into the M1 segment of the right middle cerebral artery (MCA). Occlusion of the M1 segment of the MCA was accomplished by injecting 6 to 8 (2 mm length) thrombogenic silk sutures (3-0 silk, Ethicon, San Lorenzo, PR) into the MCA through the catheter in saline using a 3 cc syringe. The incisions were closed with non-absorbent 4-0 sterile suture, and the monkeys were transported to the MRI facility for imaging. After the MRI, animals were returned to the recovery room and closely monitored by veterinary staff. The endotracheal tubes were removed when the swallowing reflex was restored. Once recovered enough to be able to sit, they were returned to their cages.

[0110] MRI was performed immediately after (1-3 hours following MRI while the animal was under anesthesia from the surgery) and 24 hours following MCAO. Images were acquired using a Philips Achieva 1.5-T scanner (Philips Medical Systems, Best, Netherlands) using an 8-channel SENSE head coil. Coronal slices were obtained perpendicular to a line joining the inferior surface of the genu and the splenium of the corpus callosum, which facilitated the re-acquisition of similar slices on the second imaging session. T2-weighted images were acquired with a Turbo Spin Echo sequence with 0.76×0.76×3 mm voxel resolution (TE=110 ms, TR=2316-2322 ms, Turbo factor=10, NSA=2, FOV=17 cm, matrix=224×222, 30 slices, no gap). Diffusion-weighted images were acquired with a single-shot Spin Echo EPI sequence with 1.72×1.72×2 mm resolution (b-values=0 and 1,000 s/mm², TE=58 ms, TR=9,977-10,047 ms, SENSE=2, NSA=6, FOV=11 cm, matrix=64×64, 41 slices, no gap). The diffusion-weighted images were registered to account for motion prior to generating Apparent Diffusion Coefficient (ADC) maps using the scanner's diffusion analysis software. Infarct volumes were approximated from both the ADC map and the T2-weighted images. Regions of interest (ROI) were hand-drawn by a radiologist on a slice-by-slice basis using the OsiriX software package (Rosset et al., 2004). The ROIs were drawn along the outer margin of the lesions. The total lesion volume was approximated by multiplying the total ROI area over all slices by the corresponding slice thickness.

[0111] Spontaneous behavior was recorded simultaneously on two different neurological scales: Standard Neurological Scale (Spetzler et al. 1980; Mack et al. 2003; and D'Arceuil et al. 2006) and Task-Oriented Neurological Scale (Mack et al. 2003). Each subject was observed twice: one or two days before MCAO to establish the baseline behavior and 20 to 23 hours after MCAO to test for the effect of the occlusion. In each session, behavior was recorded for 30 minutes by one observer who was not informed on which side of the brain the MCAO was performed. In addition to manual scoring, the animals were video recorded during each session. Since the scores obtained with the Standard Neurological Scale are measured in an ordinal scale, they were analyzed with the nonparametric Wilcoxon signed rank test. On the other hand, the scores obtained with the task-oriented scales are measured on a numeric scale and therefore, these data were analyzed with the paired t-test. After having the last MRI, animals were perfused with PBS under deep anesthesia. Brains were rapidly removed, cut continuously into 2 cm coronal slices, and biopsy punches were taken from peri-infarct regions based on the MRI data. To measure infarction, sections were stained with 2,3,5-triphenyltetrazolium chloride (TTC) then placed directly in 10% formalin. Coronal 20 mm fixed, frozen sections were used for histochemistry. Fluoro jadeB was carried out according to the manufacturer's protocols. Sections were mounted with an antifade medium.

[0112] Venous blood samples were collected at the pre-occlusion and 1-hour, 2-hours and 24-hours post-occlusion time points. The serum and peripheral blood mononuclear cells (PBMCs) were separated and stored at −80° C. for protein and RNA analysis. Cerebrospinal fluid (CSF) was collected according to well-established protocols.

[0113] FIGS. 1A-D show representative MRI images of the evolution of cerebral infarction from one of the monkeys using diffusion weighted (DWI) and T2-weighted imaging. Immediately after MCAO, restricted diffusion in the infarcted tissues was observed in two of the three monkeys observed (FIGS. 1A and 1E). There were minimal or no significant abnormalities in the T2-weighted images of any of the monkeys (FIG. 1B) as seen in human stroke patients. The infarcts, as defined by DWI, expanded 24 hours following MCAO in all animals (FIG. 1C). There was a corresponding increased T2 signal as well after 24 hours (FIG. 1D). While there was inter-animal variability in the size of the infarcts, the calculated infarct volumes increased in size compared to measurements obtained the previous day (FIG. 1E). Using a Task-Oriented Neurological Scale, the comparison of scores obtained before and after MCAO indicated a selective and significant (p<0.05) impairment in the category Distal Strength and Coordination, while no differences were observed in the categories measuring awareness and self care (Behavior) or Tone and Posture. The Task-Oriented Neurological Scale reflected a robust impairment in the left arm motor function with little or no impairment of the general neurobehavioral status of the animal. We also observed a correlation between the infarct size measured by DWI and the Distal Strength and Coordination measure (FIG. 1F).

### Example 2

### RNA/Protein Isolation and Microarray Analysis in Non-Human Primate Model of Stroke

[0114] RNA and protein from PBMCs and brain biopsy punches were isolated using TRIZOL (InVitrogen, Inc., Carlsbad, Calif.) according to the manufacturers instructions. For microarray analysis, total RNA from PBMCs was converted to double-stranded cDNA. cRNA was synthesized using a RNA transcript labeling kit (Enzo Diagnostics, Farmingdale, N.Y., USA). Biotin-labeled cRNA was cleaned up using a GeneChip Sample Cleanup Module (Affymetrix Inc, Santa Clara, Calif., USA). Twenty μg of the in vitro transcription product was fragmented in Fragmentation Buffer, by placing at 94° C. for 35 minutes. Following fragmentation, 15 μg of the biotinylated cRNA was hybridized to an GeneChip® Rhesus Macaque Genome Array (Affymetrix, Inc. Santa Clara, Calif.). The chips were hybridized at 45° C. for 16 h, and then washed, stained with streptavidin-phycoerythrin, and scanned (GeneChip® 3000 7G Scanner) according to manufacturing guidelines.

[0115] Data analysis was performed using Affymetrix Expression Console™ software that supports probe set summarization and CHP file generation of 3′ expression using the MASS Statistical algorithm. Resulting CHP data was normalized and further analyzed using Genespring GX10 (Agilent Technologies, Santa Clara, Calif.) and Genesis (Institute for Biomedical Engineering, Graz University of Technology (IBMT-TUG), Austria) Software. Gene expression values between time-points that increased or decreased by 2-fold or more were statistically significant (p<0.005) using 2-way ANOVA. Data were analyzed using Expression Console (Affymetrix Inc, Santa Clara, Calif. USA) and Genespring GX-10 (Agilent Technologies, Santa Clara, Calif.) software for initial analysis, normalization and replicate analysis. Ingenuity Pathway Analysis tools (Ingenuity Systems, www.ingenuity.com) was used to analyze gene networks, biological functions and canonical pathways. A data set containing gene identifiers and corresponding expression values was uploaded into in the application. Each gene identifier was mapped to its corresponding gene object in the Ingenuity Pathways Knowledge Base. Single array analysis was used to build the databases of gene expression profiles. Expression Console normalized data for each chip. Detection p-value (set at p<0.5) was used to statistically determine whether a transcript is expressed on a chip. The software generated a present (P), marginal (M) or absent (A) call for each transcript based on the p-value. Transcripts were considered differentially expressed if statistical logic generated calls of present and were then grouped as ‘known genes’ or ‘unknown genes’. Genes that were absent in all controls (pre-occlusion) and present at either time point are idenitifed in Tables 1-3. Self organizing map clustering and hierarchical clustering were used to identity candidates that were not present in blood prior to stroke and were induced in particular patterns following MCAO. Biomarkers that appeared in both the genomic and proteomic analyses were identified. IPA was used to predict whether these proteins are normally expressed in blood or perhaps released from the brain in response to ischemia and neuronal injury.

[0116] FIG. 2 is a representative image showing that a number of genes are induced in PBMCs (red bars) following stroke in the NHP stroke model compared to no or low expression at baseline (green bars). Genes that are differentially regulated in the NHP stroke model are listed in Tables 1-3. The corresponding human genes are listed in Tables 4-6. These gene products can be used as immediate early biomarkers (1 hr post stroke), early biomarkers (2 hr post stroke) or late biomarkers (24 hr post stroke) for stroke.

### Example 3

### High Throughput Proteomic Analysis of Blood, Cerebrospinal Fluid and Brain Tissues from Monkeys Following Focal Ischemia

[0117] Stroke biomarker candidates identified from the genomic analysis as well as novel proteins were examined using LUMINEX technology, Western blot, peptidomics and mass spectroscopy.

[0118] Blood was collected from animals before MCAO and 1, 2 and 24 hours following stroke. Cytokines, chemokines and growth factors in blood serum, CSF and brain extracts were analyzed by multiplex bead immunoassay (LUMINEX 100, Luminex Corporation, Austin, Tex., USA) according to the manufacturer's instructions and using kits from Biosource (Cat. No.; LHC 0001, LHC 0151, LHC 9121, LHC 0171, Invitrogen, Carlsbad, Calif., USA). Pre-occlusion and 1, 2 and 24-hour serum samples from three Rhesus monkeys were evaluated simultaneously for circulating cytokines, chemokines and growth factors (IL-1α, IL-1β, IL-1ra, IL-3, IL-2, IL-4, IL-5, IL-6, IL-7, IL-8, IL-9, IL-10, IL-12 (p40), IL-12(p70), IL-13, IL-15, IL-17, EGF, Eotaxin, FGF-2, FTL-3 ligand, Fractalkine, G-CSF, GM-CSF, GRO, IFN-α2, IFN-γ, IP-10, MCP-1, MCP-3, MCD, MIP-1α, MIP-1β, PDGF-aa, PGDF-aa bb, RANTES, sCD40L, sIL2-rα, TNF-α, TNF-β and VEGF) using a commercially available multiplex colorimetric bead-based cytokine immunoassay coupled with the LUMINEX system and human-specific bead sets (BioRad, San Diego, Calif.), according to the manufacturer's instructions. The results were interpolated from 5-parameter-fit standard curves generated using the relevant recombinant human proteins (BioRad). Proteins were also validated using antibodies in Western and dot blot analyses. In additional to the cytokines, chemokines and growth factors mentioned, expression of proteins identified by the microarray screen and compare to other stroke biomarkers from the published literature was examined (Foerch et al., 2009). FIG. 3A is a graph showing the protein levels of the cytokine MCP-1 in serum following MCAO in the NHP. MCP-1 increases significantly 1-2 hours after MCAO then returns to baseline at 24 hours following stroke using a LUMINEX assay. Western blot analysis of proteins from PBMCs indicates that the increased MCP-1 found in serum was induced in cells flowing stroke in the NHP (FIG. 3B).

[0119] Plasma or serum samples (˜0.5 μl) were first processed to remove larger proteins by passing them through a Microcon (Millipore cat #42406) YM-10 filter at 20,000×g for 20 min as described (Faith Maria, et al. MCP 2006; 5(6):998-1005). The filtrate was acidified to 0.25% final concentration of acetic acid before separation. The resulting peptides (10 μl) will be then separated on a 0.1×50 mm C18 column (Michrom Bioresources) using a linear gradient of acetonitrile (Sigma) in water (Burdick and Jackson) from 5% to 35% over 30 minutes. The column was then washed with 80% acetonitrile for 10 minutes followed by re-equilibration at 2% acetonitrile for an additional 10 minutes. Spectra were collected on an LTQ mass spectrometer (Thermo Scientific) using Excalibur 2.2 software. The minimum signal for DTA generation was set at 200.0 with an isolation width of 2.00, normalized collision energy of 35.0. Precursor scans were followed by MS/MS scans of the three most intense ions. Raw files were searched against a human database using BioWorks 3.3 software. Each sample was run in duplicate and all SRF files produced by BioWorks were compared using ProteoIQ (Bioinquire, Athens Ga.).

[0120] Confidence levels for each sample were set from false discovery rates of 0.05 determined from decoy database searches. FIG. 4 is a representative image showing that several proteins are increased (red bars) and decreased (green) in serum following stroke in the NHP stroke model. The numbers indicate the number of individual peptides in the serum that correspond to the presence of the specific protein. The result of the proteomic analysis is summarized in Tables 7 and 8.

[0121] The above description is for the purpose of teaching the person of ordinary skill in the art how to practice the present invention, and it is not intended to detail all those obvious modifications and variations of it which will become apparent to the skilled worker upon reading the description. It is intended, however, that all such obvious modifications and variations be included within the scope of the present invention, which is defined by the following claims. The claims are intended to cover the components and steps in any sequence which is effective to meet the objectives there intended, unless the context specifically indicates the contrary.

TABLE 1
Differentially expressed genes in PBMCs of NHPs 1-hr following MCAO

| Probe Set ID | Gene Symbol | Gene Title | UniGene ID | RefSeq Protein ID | Pre-O Signal | Pre-O detection | 1 hr Signal | 1-hr detection |
|---|---|---|---|---|---|---|---|---|
| MmugDNA.18724.1.S1_s_at | B4GALT6 | UDP-Gal:betaGlcNAc beta 1,4-galactosyltransferase, | Mmu.604 | XP_001099215 /// | 58.75183 | A | 55.18526 | P |
| | | polypeptide 6 | | XP_001099324 /// | | | | |
| | | | | XP_001099421 | | | | |
| MmugDNA.26392.1.S1_at | CCNF | cyclin F | Mmu.11675 | XP_001085466 | 114.6939 | A | 104.4854 | P |
| MmugDNA.25206.1.S1_at | CDC2 | cell division cycle 2, G1 to S and G2 to M | Mmu.16170 | XP_001095697 /// | 83.30299 | A | 49.54517 | P |
| | | | | XP_001095798 /// | | | | |
| | | | | XP_001095903 | | | | |
| Mmu.10362.1.S1_at | CLIC4 | chloride intracellular channel 4 | Mmu.4332 | XP_001106291 /// | 131.4646 | A | 89.32994 | P |
| | | | | XP_001106424 /// | | | | |
| | | | | XP_001106485 | | | | |
| MmunewRS.528.1.S1_at | CSF2RB | colony stimulating factor 2 | Mmu.1176 | XP_001086084 | 146.8577 | A | 325.4129 | P |
| | | receptor, beta, low-affinity | | | | | | |
| | | (granulocyte-macrophage) | | | | | | |
| Mmu.15973.2.S1_x_at | CSH-3 /// | chorionic somatommamotropin | Mmu.10849 | NP_001036203 /// | 122.2181 | A | 114.4969 | P |
| | CSH-4 /// | hormone 3 /// chorionic | | NP_001036207 /// | | | | |
| | GH1 /// | somatommamotropin hormone | | NP_001040618 // | | | | |
| | LOC718474 | 4 /// growth hormone 1 /// | | NP_001040620 /// | | | | |
| | /// | similar to growth hormone 1 | | XP_001111200 /// | | | | |
| | LOC721256 | isoform 1 /// similar to growth | | XP_001116436 /// | | | | |
| | /// | hormone 1 isoform 1 /// | | XP_001117351 | | | | |
| | LOC735307 | chorionic somatomammotropin-1 | | | | | | |
| MmugDNA.5060.1.S1_at | CTNND1 | catenin (cadherin-associated protein), delta 1 | Mmu.1419 | XP_001094621 /// | 79.00558 | A | 296.0597 | P |
| | | | | XP_001095087 /// | | | | |
| | | | | XP_001095314 /// | | | | |
| | | | | XP_001095429 /// | | | | |
| | | | | XP_001095545 /// | | | | |
| | | | | XP_001095646 /// | | | | |
| | | | | XP_001095745 /// | | | | |
| | | | | XP_001095859 /// | | | | |
| | | | | XP_001095967 /// | | | | |
| | | | | XP_001096070 /// | | | | |
| | | | | XP_001096183 /// | | | | |
| | | | | XP_001096303 /// | | | | |
| | | | | XP_001096427 /// | | | | |
| | | | | XP_001096539 /// | | | | |
| | | | | XP_001096644 /// | | | | |
| | | | | XP_001096747 /// | | | | |
| | | | | XP_001096864 /// | | | | |
| | | | | XP_001096974 /// | | | | |
| | | | | XP_001097086 /// | | | | |
| | | | | XP_001097202 /// | | | | |
| | | | | XP_001097299 /// | | | | |
| | | | | XP_001097408 /// | | | | |
| | | | | XP_001097505 /// | | | | |
| | | | | XP_001097599 /// | | | | |
| | | | | XP_001097712 /// | | | | |
| | | | | XP_001097810 /// | | | | |
| | | | | XP_001097908 /// | | | | |
| | | | | XP_001097998 /// | | | | |
| | | | | XP_001098090 /// | | | | |
| | | | | XP_001098194 /// | | | | |
| | | | | XP_001098301 /// | | | | |
| | | | | XP_001098398 /// | | | | |
| | | | | XP_001098491 /// | | | | |
| | | | | XP_001098588 /// | | | | |
| | | | | XP_001098689 /// | | | | |
| | | | | XP_001098792 /// | | | | |
| | | | | XP_001098897 /// | | | | |
| | | | | XP_001098993 /// | | | | |
| | | | | XP_001099102 /// | | | | |
| | | | | XP_001099203 /// | | | | |
| | | | | XP_001099314 /// | | | | |
| | | | | XP_001099411 /// | | | | |
| | | | | XP_001099522 /// | | | | |
| | | | | XP_001099613 /// | | | | |
| | | | | XP_001099715 /// | | | | |
| | | | | XP_001099819 /// | | | | |
| | | | | XP_001099920 | | | | |
| MmugDNA.1267.1.S1_s_at | CYP3A64 /// | cytochrome P450 3A64 /// | Mmu.9706 | NP_001035504 /// | 89.83363 | A | 288.6809 | P |
| | LOC718917 | similar to Cytochrome P450 | | XP_001097930 /// | | | | |
| | | 3A7 (CYPIIIA7) (P450-HFLA) | | XP_001112281 | | | | |
| MmugDNA.36232.1.S1_at | DAB2 | disabled homolog 2 | Mmu.12958 | XP_001084792 | 72.17534 | A | 60.9826 | P |
| MmugDNA.13802.1.S1_at | DCN | decorin | Mmu.1687 | XP_001103412 /// | 52.87949 | A | 78.89815 | P |
| | | | | XP_001103495 /// | | | | |
| | | | | XP_001103577 /// | | | | |
| | | | | XP_001103663 /// | | | | |
| | | | | XP_001103749 /// | | | | |
| | | | | XP_001103834 /// | | | | |
| | | | | XP_001103918 /// | | | | |
| | | | | XP_001104009 /// | | | | |
| | | | | XP_001104095 /// | | | | |
| | | | | XP_001104178 /// | | | | |
| | | | | XP_001104261 /// | | | | |
| | | | | XP_001104340 | | | | |
| MmugDNA.22700.1.S1_at | DCN | decorin | Mmu.1687 | XP_001103412 /// | 120.1081 | A | 180.4038 | P |
| | | | | XP_001103495 /// | | | | |
| | | | | XP_001103577 /// | | | | |
| | | | | XP_001103663 /// | | | | |
| | | | | XP_001103749 /// | | | | |
| | | | | XP_001103834 /// | | | | |
| | | | | XP_001103918 /// | | | | |
| | | | | XP_001104009 /// | | | | |
| | | | | XP_001104095 /// | | | | |
| | | | | XP_001104178 /// | | | | |
| | | | | XP_001104261 /// | | | | |
| | | | | XP_001104340 | | | | |
| MmugDNA.41798.1.S1_at | DHRS7 | dehydrogenase/reductase (SDR family) member 7 | Mmu.4703 | XP_001095590 /// | 122.1582 | A | 142.4385 | P |
| | | | | XP_001095688 /// | | | | |
| | | | | XP_001095790 | | | | |
| MmugDNA.26154.1.S1_at | DRD2 | dopamine receptor D2 | Mmu.3401 | XP_001085336 /// | 94.5069 | A | 172.3374 | P |
| | | | | XP_001085449 /// | | | | |
| | | | | XP_001085571 | | | | |
| MmugDNA.26188.1.S1_at | ECEL1 | endothelin converting enzyme- | Mmu.11796 | XP_001117070 | 178.3571 | A | 271.1654 | P |
| | | like 1 | | | | | | |
| MmugDNA.38477.1.S1_at | ELK4 | ELK4, ETS-domain protein (SRF accessory protein 1) | — | XP_001087748 | 144.6712 | A | 136.5781 | P |
| MmugDNA.27688.1.S1_at | EPOR | erythropoietin receptor | — | XP_001105833 | 188.3416 | A | 249.6902 | P |
| MmuSTS.4736.1.S1_at | ERBB3 | v-erb-b2 erythroblastic | Mmu.758 | XP_001113794 /// | 161.6664 | A | 180.3977 | P |
| | | leukemia viral oncogene | | XP_001113900 /// | | | | |
| | | homolog 3 (avian) | | XP_001113928 /// | | | | |
| | | | | XP_001113953 | | | | |
| MmugDNA.18128.1.S1_at | F7 | coagulation factor VII | Mmu.11080 | NP_001073605 /// | 95.21188 | A | 159.5128 | P |
| | | | | XP_001118128 | | | | |
| MmuSTS.4781.1.S1_at | FKBP10 | FK506 binding protein 10, 65 kDa | Mmu.14407 | XP_001107581 /// | 144.692 | A | 199.3497 | P |
| | | | | XP_001107638 /// | | | | |
| | | | | XP_001107696 /// | | | | |
| | | | | XP_001107756 /// | | | | |
| | | | | XP_001107821 | | | | |
| MmuSTS.4804.1.S1_at | FPR2 | formyl peptide receptor 2 | Mmu.15383 | XP_001116437 /// | 314.0186 | A | 651.3593 | P |
| | | | | XP_001116445 /// | | | | |
| | | | | XP_001116452 | | | | |
| MmugDNA.22053.1.S1_at | GGCX | gamma-glutamyl carboxylase | Mmu.13911 | XP_001086016 /// | 309.7049 | A | 350.4313 | P |
| | | | | XP_001086474 | | | | |
| MmugDNA.13746.1.S1_s_at | GK | glycerol kinase | Mmu.16427 | XP_001100778 /// | 21.59358 | A | 53.15634 | P |
| | | | | XP_001100861 /// | | | | |
| | | | | XP_001100968 | | | | |
| MmugDNA.37125.1.S1_at | GLRB | glycine receptor, beta | Mmu.1658 | XP_001093718 /// | 140.4933 | A | 195.3956 | P |
| | | | | XP_001093832 | | | | |
| Mmu.8905.1.S1_at | GPD1 | glycerol-3-phosphate | Mmu.3010 | XP_001102726 | 70.93366 | A | 112.7022 | P |
| | | dehydrogenase 1 (soluble) | | | | | | |
| Mmu.11695.1.S1_at | GPR34 | G protein-coupled receptor 34 | Mmu.3224 | XP_001087742 /// | 146.0326 | A | 99.20039 | P |
| | | | | XP_001087858 /// | | | | |
| | | | | XP_001087981 /// | | | | |
| | | | | XP_001088105 | | | | |
| MmuSTS.2489.1.S1_at | GPR77 | G protein-coupled receptor 77 | Mmu.15399 | XP_001112895 /// | 85.30246 | A | 155.9195 | P |
| | | | | XP_001112923 /// | | | | |
| | | | | XP_001112956 | | | | |
| MmugDNA.7761.1.S1_at | HIPK2 | homeodomain interacting | Mmu.4514 | XP_001106719 | 112.2257 | A | 149.4128 | P |
| | | protein kinase 2 | | | | | | |
| MmuSTS.1348.1.S1_at | HOXB7 | homeobox B7 | Mmu.16913 | XP_001088822 | 134.1311 | A | 174.3028 | P |
| MmugDNA.18776.1_S1_at | HPD | 4-hydroxyphenylpyruvate | Mmu.14575 | XP_001096061 /// | 81.20009 | A | 180.3834 | P |
| | | dioxygenase | | XP_001096175 | | | | |
| MmugDNA.28970.1.S1_at | IL1RN | interleukin 1 receptor | Mmu.15827 | XP_001091493 /// | 126.3157 | A | 288.0709 | P |
| | | antagonist | | XP_001091717 /// | | | | |
| | | | | XP_001091833 | | | | |
| MmuSTS.681.1.S1_at | IL1RN | interleukin 1 receptor | Mmu.15827 | XP_001091493 /// | 108.0968 | A | 374.1611 | P |
| | | antagonist | | XP_001091717 /// | | | | |
| | | | | XP_001091833 | | | | |
| MmugDNA.36020.1.S1_at | ITGB5 | integrin, beta 5 | Mmu.1239 | XP_001113831 /// | 118.9835 | A | 125.353 | P |
| | | | | XP_001113881 /// | | | | |
| | | | | XP_001113909 | | | | |
| Mmu.7460.6.S1_x_at | KIR3DH5 | killer-cell Ig-like receptor | Mmu.17415 | NP_001098643 | 251.4261 | A | 276.8067 | P |
| | | KIR3DH5 | | | | | | |
| Mmu.9316.1.S1_at | KLF11 | Kruppel-like factor 11 | Mmu.11355 | XP_001090608 | 501.1391 | A | 764.6097 | P |
| MmuSTS.1757.1.S1_at | LOC693556 | similar to ras responsive | Mmu.14828 | XP_001082265 /// | 109.3152 | A | 140.1759 | P |
| | | element binding protein 1 | | XP_001082516 /// | | | | |
| | | isoform 1 | | XP_001082652 /// | | | | |
| | | | | XP_001082784 /// | | | | |
| | | | | XP_001082911 | | | | |
| MmugDNA.20287.1.S1_at | LOC693696 | similar to longevity assurance | Mmu.16301 | XP_001082530 /// | 9.598577 | A | 66.55032 | P |
| | | homolog 2 | | XP_001082667 /// | | | | |
| | | | | XP_001082802 | | | | |
| MmugDNA.17057.1.S1_at | LOC694043 | Similar to RECK protein | Mmu.12983 | XP_001083242 /// | 36.28584 | A | 109.4269 | P |
| | | precursor | | XP_001083599 | | | | |
| MmugDNA.14488.1.S1_at | LOC694192 | similar to Protein C18orf54 | Mmu.15470 | XP_001082497 /// | 158.6407 | A | 85.90692 | P |
| | | precursor | | XP_001082628 /// | | | | |
| | | | | XP_001082761 | | | | |
| MmugDNA.32899.1.S1_at | LOC694220 | similar to glutathione S- | Mmu.16453 | XP_001083156 /// | 151.0824 | A | 150.7997 | P |
| | | transferase, C-terminal domain | | XP_001083273 /// | | | | |
| | | containing isoform 1 | | XP_001083401 | | | | |
| MmugDNA.35637.1.S1_at | LOC694461 | similar to RIO kinase 1 isoform 1 | Mmu.13193 | XP_001084416 /// | 195.3009 | A | 278.8399 | P |
| | | | | XP_001084537 /// | | | | |
| | | | | XP_001084661 | | | | |
| MmugDNA.7498.1.S1_at | LOC695519 | hypothetical protein | Mmu.14586 | XP_001088156 | 103.4704 | A | 289.532 | P |
| | | LOC695519 | | | | | | |
| MmugDNA.23700.1.S1_at | LOC695660 | similar to glutamate receptor 6 isoform 1 precursor | Mmu.14770 | XP_001086511 /// | 71.56487 | A | 134.0835 | P |
| | | | | XP_001086640 /// | | | | |
| | | | | XP_001086762 | | | | |
| MmugDNA.40736.1.S1_at | LOC695861 | similar to regulatory factor X3 | Mmu.15656 | XP_001086023 /// | 59.62864 | A | 159.93 | P |
| | | isoform b | | XP_001086140 /// | | | | |
| | | | | XP_001086369 /// | | | | |
| | | | | XP_001086480 /// | | | | |
| | | | | XP_001086606 /// | | | | |
| | | | | XP_001086729 | | | | |
| MmugDNA.3419.1.S1_at | LOC696314 | similar to tumor necrosis factor, | Mmu.9026 | — | 133.7824 | A | 178.2315 | P |
| | | alpha-induced protein 2 | | | | | | |
| MmugDNA.40590.1.S1_at | LOC696991 | similar to CG13322-PA, isoform A | Mmu.15342 | XP_001090213 /// | 151.6879 | A | 117.6347 | P |
| | | | | XP_001090328 /// | | | | |
| | | | | XP_001090443 /// | | | | |
| | | | | XP_001090556 | | | | |
| MmugDNA.23596.1.S1_at | LOC697028 | similar to dedicator of | Mmu.4738 | XP_001085641 | 42.86666 | A | 83.91882 | P |
| | | cytokinesis 7 | | | | | | |
| MmugDNA.19935.1.S1_at | LOC697140 | similar to LIM domain binding 3 | Mmu.11452 | XP_001084921 /// | 127.76 | A | 82.97771 | P |
| | | | | XP_001085158 /// | | | | |
| | | | | XP_001085274 | | | | |
| MmugDNA.25784.1.S1_at | LOC697300 | Similar to DNA topoisomerase I | Mmu.12250 | XP_001088021 | 107.8373 | A | 168.2853 | P |
| MmugDNA.41587.1.S1_at | LOC697948 | similar to Apical Junction | Mmu.15719 | XP_001094873 /// | 231.1788 | A | 220.4972 | P |
| | | Molecule family member (ajm- | | XP_001094990 /// | | | | |
| | | 1) | | XP_001095091 /// | | | | |
| | | | | XP_001095202 /// | | | | |
| | | | | XP_001095318 /// | | | | |
| | | | | XP_001095432 /// | | | | |
| | | | | XP_001095548 | | | | |
| MmugDNA.8688.1.S1_s_at | LOC698576 | similar to plakophilin 4 isoform a | Mmu.90 | XP_001090763 /// | 57.58762 | A | 168.3158 | P |
| | | | | XP_001091487 /// | | | | |
| | | | | XP_001091595 /// | | | | |
| | | | | XP_001091710 /// | | | | |
| | | | | XP_001091829 | | | | |
| MmugDNA.25652.1.S1_at | LOC698610 | similar to netrin-G1 ligand | Mmu.14852 | XP_001090221 /// | 159.8217 | A | 335.8282 | P |
| | | | | XP_001090333 /// | | | | |
| | | | | XP_001090447 | | | | |
| MmugDNA.7880.1.S1_at | LOC698922 | similar to transcription | Mmu.1273 | XP_001087401 | 67.81429 | A | 129.1399 | P |
| | | elongation factor B (SIII), | | | | | | |
| | | polypeptide 1 | | | | | | |
| MmugDNA.26991.1.S1_x_at | LOC699049 | similar to SMT3 suppressor of | Mmu.10807 | XP_001082298 /// | 132.9624 | A | 98.17895 | P |
| | /// | mif two 3 homolog 2 /// similar | | XP_001093875 /// | | | | |
| | LOC705512 | to SMT3 suppressor of mif two | | XP_001101180 | | | | |
| | /// | 3 homolog 2 isoform b | | | | | | |
| | LOC712242 | precursor /// similar to SMT3 | | | | | | |
| | /// SUMO2 | suppressor of mif two 3 | | | | | | |
| | | homolog 2 /// SMT3 suppressor | | | | | | |
| | | of mif two 3 homolog 2 (S. cerevisiae) | | | | | | |
| MmugDNA.30038.1.S1_at | LOC699233 | similar to J domain protein | Mmu.14908 | XP_001091149 /// | 20.38795 | A | 40.94059 | P |
| | | C21orf55 | | XP_001091275 /// | | | | |
| | | | | XP_001091400 | | | | |
| MmugDNA.24540.1.S1_at | LOC699255 | similar to c-Mpl binding protein | Mmu.8566 | XP_001103235 | 97.93331 | A | 95.29922 | P |
| | /// | isoform c /// similar to c-Mpl | | | | | | |
| | LOC713773 | binding protein isoform a | | | | | | |
| MmugDNA.36570.1.S1_at | LOC699320 | similar to keratin 1 | Mmu.15995 | XP_001097706 /// | 82.466 | A | 52.41996 | P |
| | | | | XP_001097800 /// | | | | |
| | | | | XP_001097902 /// | | | | |
| | | | | XP_001097988 /// | | | | |
| | | | | XP_001098082 /// | | | | |
| | | | | XP_001098182 /// | | | | |
| | | | | XP_001098292 | | | | |
| MmugDNA.34762.1.S1_at | LOC699606 | similar to YKT6 v-SNARE | Mmu.14457 | XP_001092458 /// | 352.2617 | A | 340.2292 | P |
| | | protein | | XP_001092567 | | | | |
| MmugDNA.35909.1.S1_at | LOC700246 | hypothetical protein | Mmu.16339 | XP_001091537 /// | 141.387 | A | 109.4642 | P |
| | | LOC700246 | | XP_001091653 /// | | | | |
| | | | | XP_001091770 | | | | |
| MmugDNA.2141.1.S1_at | LOC700632 | similar to tumor protein p53 | Mmu.12749 | XP_001090474 /// | 103.4481 | A | 110.7 | P |
| | | inducible nuclear protein 1 | | XP_001090592 | | | | |
| MmugDNA.6969.1.S1_s_at | LOC700634 | similar to PTK2 protein tyrosine | Mmu.3254 | XP_001091188 /// | 318.6551 | A | 548.1872 | P |
| | | kinase 2 isoform a | | XP_001092257 /// | | | | |
| | | | | XP_001092479 /// | | | | |
| | | | | XP_001092599 /// | | | | |
| | | | | XP_001092714 /// | | | | |
| | | | | XP_001092835 /// | | | | |
| | | | | XP_001092947 /// | | | | |
| | | | | XP_001093060 /// | | | | |
| | | | | XP_001093166 /// | | | | |
| | | | | XP_001093282 | | | | |
| MmugDNA.11282.1.S1_at | LOC700766 | similar to CG14299-PA, isoform A | Mmu.13220 | XP_001089105 | 102.762 | A | 134.5001 | P |
| MmuSTS.1092.1.S1_at | LOC701162 | similar to solute carrier family | Mmu.11269 | XP_001099500 | 62.05202 | A | 108.5072 | P |
| | | 6, member 17 | | | | | | |
| MmugDNA.9882.1.S1_at | LOC701376 | similar to NADPH oxidase 1 isoform long variant | Mmu.15254 | XP_001089791 /// | 59.80977 | A | 168.2042 | P |
| | | | | XP_001089905 /// | | | | |
| | | | | XP_001090025 /// | | | | |
| | | | | XP_001090252 /// | | | | |
| | | | | XP_001090373 | | | | |
| MmugDNA.24847.1.S1_at | LOC701547 | similar to glycine-N- | Mmu.14222 | XP_001092072 /// | 104.8917 | A | 97.61919 | P |
| | | acyltransferase-like 1 | | XP_001092197 /// | | | | |
| | | | | XP_001092316 /// | | | | |
| | | | | XP_001092427 | | | | |
| Mmu.11429.1.A1_at | LOC701690 | Similar to T-cell activation Rho | Mmu.12230 | XP_001095239 /// | 125.3303 | A | 148.4935 | P |
| | | GTPase-activating protein | | XP_001095349 /// | | | | |
| | | isoform b | | XP_001095467 /// | | | | |
| | | | | XP_001095579 /// | | | | |
| | | | | XP_001095675 /// | | | | |
| | | | | XP_001095775 | | | | |
| MmugDNA.14409.1.S1_at | LOC701722 | similar to nucleoporin 62 | Mmu.12987 | XP_001094695 | 17.99913 | A | 56.40857 | P |
| MmugDNA.12356.1.S1_at | LOC702392 | similar to peroxin1 | Mmu.13262 | XP_001100851 /// | 267.6477 | A | 482.0948 | P |
| | | | | XP_001101055 | | | | |
| MmugDNA.35938.1.S1_at | LOC702474 | similar to F46E10.1a /// similar | Mmu.11756 | XP_001093983 /// | 212.2583 | A | 148.9655 | P |
| | /// | to radical S-adenosyl | | XP_001097818 | | | | |
| | LOC705626 | methionine domain containing 1 | | | | | | |
| MmugDNA.30120.1.S1_at | LOC702596 | similar to nucleolar RNA- | Mmu.15669 | XP_001099108 /// | 517.206 | A | 779.2531 | P |
| | | associated protein alpha | | XP_001099208 | | | | |
| | | isoform | | | | | | |
| MmugDNA.14645.1.S1_at | LOC702627 | similar to CNKSR family | Mmu.16800 | XP_001095122 | 112.3272 | A | 135.1359 | P |
| | | member 3 | | | | | | |
| MmuSTS.4277.1.S1_at | LOC702809 | similar to eukaryotic translation | Mmu.7828 | XP_001096741 /// | 46.99945 | A | 76.99638 | P |
| | /// | elongation factor 1 alpha 2 /// | | XP_001107881 /// | | | | |
| | LOC703715 | similar to eukaryotic translation | | XP_001107938 /// | | | | |
| | /// | elongation factor 1 alpha 2 /// | | XP_001107997 /// | | | | |
| | LOC704199 | similar to eukaryotic translation | | XP_001108047 | | | | |
| | /// | elongation factor 1 alpha 2 /// | | | | | | |
| | LOC704438 | similar to eukaryotic translation | | | | | | |
| | /// | elongation factor 1 alpha 1 /// | | | | | | |
| | LOC709017 | similar to eukaryotic translation | | | | | | |
| | /// | elongation factor 1 alpha 1 /// | | | | | | |
| | LOC715351 | similar to eukaryotic translation | | | | | | |
| | | elongation factor 1 alpha 1 | | | | | | |
| MmugDNA.18234.1.S1_s_at | LOC703331 | similar to runt-related | Mmu.14787 | XP_001100592 /// | 58.99397 | A | 140.3681 | P |
| | | transcription factor 2 isoform b | | XP_001100682 /// | | | | |
| | | | | XP_001100772 /// | | | | |
| | | | | XP_001100855 /// | | | | |
| | | | | XP_001100961 /// | | | | |
| | | | | XP_001101058 | | | | |
| MmugDNA.42623.1.S1_at | LOC703350 | Similar to SLD5 | Mmu.12445 | XP_001094432 | 116.1626 | A | 122.4898 | P |
| MmugDNA.14145.1.S1_s_at | LOC703676 | similar to clusterin associated | Mmu.12076 | XP_001095007 | 9.514027 | A | 65.8841 | P |
| | | protein 1 isoform 1 | | | | | | |
| MmugDNA.6896.1.S1_at | LOC703747 | hypothetical protein | Mmu.11245 | XP_001097797 /// | 99.1186 | A | 203.7421 | P |
| | | LOC703747 | | XP_001097899 /// | | | | |
| | | | | XP_001097986 /// | | | | |
| | | | | XP_001098078 /// | | | | |
| | | | | XP_001098178 /// | | | | |
| | | | | XP_001098384 | | | | |
| MmugDNA.20879.1.S1_at | LOC703981 | similar to NOD9 protein isoform 1 | Mmu.15714 | XP_001104018 /// | 68.5675 | A | 220.5779 | P |
| | | | | XP_001104187 /// | | | | |
| | | | | XP_001104271 /// | | | | |
| | | | | XP_001104348 /// | | | | |
| | | | | XP_001104430 | | | | |
| MmugDNA.43058.1.S1_at | LOC704126 | similar to kinesin family | Mmu.14823 | XP_001096456 /// | 240.8623 | A | 350.718 | P |
| | | member 13A | | XP_001096670 /// | | | | |
| | | | | XP_001096780 /// | | | | |
| | | | | XP_001096896 | | | | |
| MmugDNA.32338.1.S1_at | LOC704620 | Hypothetical protein | Mmu.12860 | XP_001092983 | 484.9445 | A | 883.7935 | P |
| | | LOC704620 | | | | | | |
| MmugDNA.26222.1.S1_at | LOC704779 | hypothetical protein | Mmu.1356 | XP_001088505 /// | 145.6491 | A | 301.6946 | P |
| | | LOC704779 | | XP_001088616 /// | | | | |
| | | | | XP_001088722 /// | | | | |
| | | | | XP_001088845 | | | | |
| MmugDNA.41256.1.S1_at | LOC705369 | similar to SET domain | Mmu.12527 | XP_001103146 /// | 307.612 | A | 308.8239 | P |
| | | containing 3 | | XP_001103224 /// | | | | |
| | | | | XP_001103370 | | | | |
| MmugDNA.32069.1.S1_at | LOC705781 | similar to CG10721-PA | Mmu.11312 | XP_001098386 | 139.6408 | A | 177.6773 | P |
| MmugDNA.7008.1.S1_at | LOC705781 | similar to CG10721-PA | Mmu.11312 | XP_001098386 | 257.4816 | A | 150.1654 | P |
| MmugDNA.11389.1.S1_at | LOC705913 | similar to cytidine deaminase | Mmu.14713 | XP_001096632 | 157.2027 | A | 225.252 | P |
| Mmu.8604.1.A1_at | LOC706093 | Similar to golgi-associated | Mmu.12976 | XP_001099454 /// | 105.2247 | A | 94.18667 | P |
| | | microtubule-binding protein | | XP_001099564 | | | | |
| | | HOOK3 | | | | | | |
| MmugDNA.6257.1.S1_at | LOC706392 | similar to Temporarily Assigned | Mmu.15492 | XP_001100027 /// | 28.65171 | A | 176.2832 | P |
| | | Gene name family member | | XP_001100112 /// | | | | |
| | | (tag-241) | | XP_001100204 | | | | |
| MmugDNA.2760.1.S1_at | LOC706531 | similar to SRY (sex determining | Mmu.2172 | XP_001098923 | 494.1494 | A | 361.4545 | P |
| | | region Y)-box 4 | | | | | | |
| MmugDNA.21203.1.S1_x_at | LOC707383 | similar to amyloid beta (A4) | Mmu.669 | XP_001101993 | 428.4578 | A | 214.6058 | P |
| | | precursor protein-binding, | | | | | | |
| | | family B, member 1 interacting | | | | | | |
| | | protein | | | | | | |
| MmugDNA.35674.1.S1_at | LOC707661 | similar to additional sex combs | Mmu.15484 | XP_001101400 /// | 110.2575 | A | 137.5026 | P |
| | | like 1 | | XP_001101495 /// | | | | |
| | | | | XP_001101584 /// | | | | |
| | | | | XP_001101677 | | | | |
| MmugDNA.14411.1.S1_at | LOC707686 | similar to angiogenic factor | Mmu.12022 | XP_001106588 /// | 312.2592 | A | 193.1674 | P |
| | | VG5Q | | XP_001106645 /// | | | | |
| | | | | XP_001106704 /// | | | | |
| | | | | XP_001106767 | | | | |
| MmugDNA.6011.1.S1_at | LOC707982 | similar to rhomboid domain | Mmu.15898 | XP_001110015 /// | 253.2026 | A | 444.7268 | P |
| | /// | containing 1 /// hypothetical | | XP_001110070 /// | | | | |
| | LOC708189 | protein LOC708189 | | XP_001110119 /// | | | | |
| | | | | XP_001110165 /// | | | | |
| | | | | XP_001110210 | | | | |
| MmugDNA.37057.1.S1_at | LOC708094 | similar to mannosyl (alpha-1,3-)- | Mmu.15839 | XP_001102758 /// | 104.4101 | A | 124.6013 | P |
| | | glycoprotein beta-1,4-N- | | XP_001102852 | | | | |
| | | acetylglucosaminyltransferase, isoenzyme A | | | | | | |
| MmugDNA.30697.1.S1_at | LOC708649 | similar to leucine rich repeat | Mmu.13704 | XP_001101795 /// | 163.4347 | A | 185.626 | P |
| | | containing 28 | | XP_001101886 /// | | | | |
| | | | | XP_001101987 /// | | | | |
| | | | | XP_001102074 | | | | |
| MmuSTS.4837.1.S1_at | LOC708940 | similar to Guanine nucleotide- | Mmu.14862 | XP_001108555 /// | 67.89697 | A | 77.73469 | P |
| | | binding protein G(i), alpha-1 | | XP_001108609 /// | | | | |
| | | subunit (Adenylate cyclase- | | XP_001108656 | | | | |
| | | inhibiting G alpha protein) | | | | | | |
| MmuSTS.508.1.S1_at | LOC709049 | similar to activating signal | Mmu.14734 | XP_001105587 /// | 145.0563 | A | 121.9355 | P |
| | | cointegrator 1 complex subunit 1 | | XP_001105655 /// | | | | |
| | | | | XP_001105727 /// | | | | |
| | | | | XP_001105789 /// | | | | |
| | | | | XP_001105856 /// | | | | |
| | | | | XP_001105929 /// | | | | |
| | | | | XP_001106003 | | | | |
| MmugDNA.32637.1.S1_at | LOC709253 | similar to nucleosomal binding | Mmu.13802 | XP_001103630 | 80.94846 | A | 79.39787 | P |
| | | protein 1 | | | | | | |
| Mmu.10346.1.S1_at | LOC709544 | hypothetical protein | Mmu.16556 | XP_001096738 | 507.0977 | A | 328.4313 | P |
| | | LOC709544 | | | | | | |
| MmugDNA.1217.1.S1_at | LOC709920 | similar to Helix-loop-helix | Mmu.15111 | XP_001112029 /// | 8.452376 | A | 74.10219 | P |
| | | protein 2 (HEN2) (Nescient | | XP_001112063 /// | | | | |
| | | helix loop helix 2) (NSCL-2) | | XP_001112098 | | | | |
| MmugDNA.26478.1.S1_at | LOC710518 | similar to mitochondrial solute | Mmu.11000 | XP_001105927 /// | 455.317 | A | 606.7848 | P |
| | | carrier-like protein | | XP_001106001 /// | | | | |
| | | | | XP_001106076 /// | | | | |
| | | | | XP_001106141 /// | | | | |
| | | | | XP_001106211 | | | | |
| MmugDNA.28666.1.S1_at | LOC710731 | similar to palmdelphin | Mmu.12773 | XP_001105606 /// | 37.84584 | A | 95.51393 | P |
| | | | | XP_001105677 /// | | | | |
| | | | | XP_001105748 /// | | | | |
| | | | | XP_001105804 /// | | | | |
| | | | | XP_001105954 | | | | |
| MmugDNA.17269.1.S1_at | LOC711164 | similar to sulfite oxidase | Mmu.15990 | XP_001113374 /// | 171.6959 | A | 246.8745 | P |
| | | | | XP_001113406 /// | | | | |
| | | | | XP_001113430 /// | | | | |
| | | | | XP_001113456 | | | | |
| MmugDNA.4283.1.S1_at | LOC711279 | similar to leucine zipper, | Mmu.16155 | XP_001109524 /// | 156.9818 | A | 240.0757 | P |
| | | putative tumor suppressor 2 | | XP_001109574 /// | | | | |
| | | | | XP_001109628 /// | | | | |
| | | | | XP_001109674 /// | | | | |
| | | | | XP_001109715 /// | | | | |
| | | | | XP_001109770 /// | | | | |
| | | | | XP_001109817 | | | | |
| MmugDNA.33876.1.S1_s_at | LOC711336 | similar to olfactomedin 2 | Mmu.15445 | XP_001099531 /// | 105.1338 | A | 116.0832 | P |
| | | | | XP_001099628 /// | | | | |
| | | | | XP_001099726 /// | | | | |
| | | | | XP_001099831 | | | | |
| MmugDNA.17217.1.S1_at | LOC711485 | similar to acyl-Coenzyme A | Mmu.12959 | XP_001109931 | 123.1174 | A | 238.599 | P |
| | | dehydrogenase, long chain precursor | | | | | | |
| MmugDNA.15166.1.S1_at | LOC711633 | similar to zinc finger CCCH-type | Mmu.15988 | XP_001114089 /// | 185.2786 | A | 222.4264 | P |
| | | containing 10 | | XP_001114107 /// | | | | |
| | | | | XP_001114132 /// | | | | |
| | | | | XP_001114150 | | | | |
| MmuSTS.4200.1.S1_at | LOC711691 | Similar to pre-B-cell leukemia | Mmu.4832 | XP_001100529 | 105.6631 | A | 385.9178 | P |
| | | transcription factor 3 | | | | | | |
| MmugDNA.30723.1.S1_at | LOC711984 | Similar to zinc finger CCCH- | Mmu.12594 | XP_001106124 /// | 175.1743 | A | 445.4023 | P |
| | | type domain containing 7 | | XP_001106316 /// | | | | |
| | | | | XP_001106384 /// | | | | |
| | | | | XP_001106446 | | | | |
| MmugDNA.20892.1.S1_at | LOC712033 | similar to PCTAIRE protein | Mmu.14735 | XP_001100911 | 120.9395 | A | 238.5381 | P |
| | | kinase 1 | | | | | | |
| MmugDNA.10446.1.S1_at | LOC712115 | similar to ADP-ribosylation | Mmu.14062 | XP_001101005 | 75.08247 | A | 68.66737 | P |
| | | factor guanine nucleotide factor | | | | | | |
| | | 6 isoform a | | | | | | |
| MmugDNA.12728.1.S1_at | LOC712272 | similar to fibronectin type 3 and | Mmu.13034 | XP_001109699 | 37.6952 | A | 102.0832 | P |
| | | SPRY domain-containing protein | | | | | | |
| MmugDNA.22601.1.S1_at | LOC713029 | hypothetical protein | Mmu.14564 | XP_001110409 | 11.16738 | A | 58.5388 | P |
| | | LOC713029 | | | | | | |
| MmugDNA.12133.1.S1_at | LOC713035 | similar to BCL2-like 1 isoform 1 | Mmu.16103 | XP_001109879 /// | 159.8234 | A | 137.4199 | P |
| | | | | XP_001109926 /// | | | | |
| | | | | XP_001109964 /// | | | | |
| | | | | XP_001110009 /// | | | | |
| | | | | XP_001110062 /// | | | | |
| | | | | XP_001110113 /// | | | | |
| | | | | XP_001110162 /// | | | | |
| | | | | XP_001110205 /// | | | | |
| | | | | XP_001110245 /// | | | | |
| | | | | XP_001110285 /// | | | | |
| | | | | XP_001110326 | | | | |
| MmugDNA.17300.1.S1_s_at | LOC713324 | similar to erythrocyte | Mmu.14133 | XP_001102639 | 68.31221 | A | 110.1094 | P |
| | | membrane protein band 4.1 like | | | | | | |
| | | 4B isoform 2 | | | | | | |
| MmuSTS.2766.1.S1_at | LOC713353 | Similar to unactive | Mmu.4022 | XP_001115328 /// | 77.942 | A | 160.7406 | P |
| | | progesterone receptor, 23 kD | | XP_001115356 /// | | | | |
| | | | | XP_001115374 /// | | | | |
| | | | | XP_001115388 | | | | |
| MmugDNA.37205.1.S1_at | LOC713800 | similar to plexin A2 | Mmu.15066 | XP_001110877 /// | 40.86835 | A | 79.4382 | P |
| | | | | XP_001110951 /// | | | | |
| | | | | XP_001110980 | | | | |
| MmugDNA.23412.1.S1_x_at | LOC715553 | similar to Protein PP2447 | Mmu.16050 | XP_001111734 /// | 651.9257 | A | 657.9822 | P |
| | | | | XP_001111774 /// | | | | |
| | | | | XP_001111813 /// | | | | |
| | | | | XP_001111850 /// | | | | |
| | | | | XP_001111878 /// | | | | |
| | | | | XP_001111918 /// | | | | |
| | | | | XP_001111956 | | | | |
| MmuSTS.563.1.S1_at | LOC715706 | Similar to schlafen family | Mmu.11333 | XP_001114176 /// | 47.03052 | A | 79.03813 | P |
| | | member 13 | | XP_001114192 /// | | | | |
| | | | | XP_001114211 | | | | |
| MmugDNA.23724.1.S1_at | LOC715752 | similar to zinc finger protein 44 | Mmu.13185 | XP_001107149 /// | 177.6898 | A | 126.2318 | P |
| | | | | XP_001107204 /// | | | | |
| | | | | XP_001107269 | | | | |
| MmugDNA.30744.1.S1_s_at | LOC715853 | similar to interphase | Mmu.13940 | XP_001113603 | 221.8494 | A | 233.8704 | P |
| | | cyctoplasmic foci protein 45 | | | | | | |
| MmugDNA.11990.1.S1_at | LOC716153 | similar to myelin gene | Mmu.13074 | XP_001106720 | 32.29033 | A | 49.318 | P |
| | | expression factor 2 | | | | | | |
| MmugDNA.17648.1.S1_at | LOC716239 | similar to Pre-B-cell leukemia | Mmu.6054 | — | 117.4557 | A | 180.2829 | P |
| | | transcription factor 2 | | | | | | |
| | | (Homeobox protein PBX2) | | | | | | |
| | | (Protein G17) | | | | | | |
| MmugDNA.40257.1.S1_at | LOC716245 | similar to sphingosine-1- | Mmu.4100 | XP_001106861 | 122.3767 | A | 129.1462 | P |
| | | phosphate lyase 1 | | | | | | |
| MmugDNA.36455.1.S1_at | LOC716351 | similar to SEC22 vesicle | Mmu.14967 | XP_001115262 /// | 162.7943 | A | 137.2903 | P |
| | | trafficking protein homolog C | | XP_001115277 /// | | | | |
| | | isoform b | | XP_001115291 /// | | | | |
| | | | | XP_001115333 /// | | | | |
| | | | | XP_001115349 /// | | | | |
| | | | | XP_001115363 /// | | | | |
| | | | | XP_001115380 | | | | |
| Mmu.8945.1.S1_at | LOC717346 | similar to complement factor H | Mmu.4677 | XP_001111499 /// | 90.61079 | A | 143.7754 | P |
| | | isoform a precursor | | XP_001111535 /// | | | | |
| | | | | XP_001111875 | | | | |
| MmuSTS.2495.1.S1_at | LOC719814 | similar to zinc finger protein | Mmu.15382 | XP_001116472 /// | 105.0435 | A | 110.711 | P |
| | | 577 | | XP_001116485 /// | | | | |
| | | | | XP_001116492 | | | | |
| MmugDNA.11286.1.S1_at | LOC720186 | similar to immunoglobulin | Mmu.11138 | XP_001115307 | 385.697 | A | 568.326 | P |
| | | superfamily, member 8 | | | | | | |
| MmunewRS.138.1.S1_at | LOC721825 | similar to cAMP responsive | Mmu.11710 | XP_001118020 | 87.49419 | A | 151.4151 | P |
| | | element binding protein 3-like 3 | | | | | | |
| MmugDNA.16852.1.S1_at | LTB4R | leukotriene B4 receptor | — | XP_001114016 /// | 97.06477 | A | 171.7247 | P |
| | | | | XP_001114035 | | | | |
| MmugDNA.21143.1.S1_at | MAOA | monoamine oxidase A | Mmu.3283 | XP_001096840 | 127.6487 | A | 274.6833 | P |
| MmugDNA.17553.1.S1_at | MMP19 | matrix metallopeptidase 19 | — | XP_001111542 /// | 95.18174 | A | 216.4568 | P |
| | | | | XP_001111624 | | | | |
| MmugDNA.33389.1.S1_at | MPZL2 | myelin protein zero-like 2 | — | XP_001096977 /// | 93.9895 | A | 109.8271 | P |
| | | | | XP_001097090 | | | | |
| MmugDNA.15929.1.S1_at | MRAS | muscle RAS oncogene homolog | Mmu.14559 | XP_001114261 /// | 44.73249 | A | 105.5022 | P |
| | | | | XP_001114274 /// | | | | |
| | | | | XP_001114299 /// | | | | |
| | | | | XP_001114317 | | | | |
| MmuSTS.4170.1.S1_at | MRAS | muscle RAS oncogene homolog | Mmu.14559 | XP_001114261 /// | 150.9189 | A | 150.6777 | P |
| | | | | XP_001114274 /// | | | | |
| | | | | XP_001114299 /// | | | | |
| | | | | XP_001114317 | | | | |
| MmugDNA.3439.1.S1_at | NEB | nebulin | Mmu.10774 | XP_001084585 | 4.838272 | A | 79.8995 | P |
| MmugDNA.28543.1.S1_at | NR4A2 | Nuclear receptor subfamily 4, | Mmu.11507 | XP_001085438 /// | 67.00845 | A | 127.2987 | P |
| | | group A, member 2 | | XP_001085797 /// | | | | |
| | | | | XP_001085905 /// | | | | |
| | | | | XP_001086011 /// | | | | |
| | | | | XP_001086128 /// | | | | |
| | | | | XP_001086234 /// | | | | |
| | | | | XP_001086356 /// | | | | |
| | | | | XP_001086593 /// | | | | |
| | | | | XP_001086719 | | | | |
| MmugDNA.31823.1.S1_at | PRKACB | protein kinase, cAMP- | Mmu.1940 | XP_001105459 /// | 145.2954 | A | 153.0346 | P |
| | | dependent, catalytic, beta | | XP_001105534 /// | | | | |
| | | | | XP_001105605 /// | | | | |
| | | | | XP_001105676 /// | | | | |
| | | | | XP_001105747 /// | | | | |
| | | | | XP_001105803 /// | | | | |
| | | | | XP_001105875 /// | | | | |
| | | | | XP_001105953 /// | | | | |
| | | | | XP_001106026 /// | | | | |
| | | | | XP_001106097 /// | | | | |
| | | | | XP_001106164 | | | | |
| MmugDNA.7366.1.S1_at | PRKCA | protein kinase C, alpha | Mmu.5709 | — | 168.4086 | A | 185.0983 | P |
| MmugDNA.36754.1.S1_at | PRR3 | proline rich 3 | Mmu.12623 | XP_001100535 | 92.55525 | A | 96.15895 | P |
| MmugDNA.7677.1.S1_at | RBM34 | RNA binding motif protein 34 | Mmu.12653 | XP_001102020 /// | 139.6196 | A | 132.859 | P |
| | | | | XP_001102111 | | | | |
| MmuSTS.3315.1.S1_at | SH3GLB2 | SH3-domain GRB2-like | Mmu.17131 | XP_001109262 | 415.9608 | A | 394.2061 | P |
| | | endophilin B2 | | | | | | |
| MmugDNA.34347.1.S1_s_at | SLC25A13 | solute carrier family 25, | Mmu.11416 | XP_001088340 | 83.63106 | A | 107.3469 | P |
| | | member 13 (citrin) | | | | | | |
| MmugDNA.43541.1.S1_at | SLC25A17 | Solute carrier family 25 | Mmu.4154 | XP_001102293 | 135.3007 | A | 74.23647 | P |
| | | (mitochondrial carrier; | | | | | | |
| | | peroxisomal membrane protein, | | | | | | |
| | | 34 kDa), member 17 | | | | | | |
| MmugDNA.15062.1.S1_at | SSBP1 | Single-stranded DNA binding | Mmu.4481 | XP_001084058 /// | 129.9467 | A | 215.4136 | P |
| | | protein 1 | | XP_001084179 /// | | | | |
| | | | | XP_001084295 /// | | | | |
| | | | | XP_001084414 /// | | | | |
| | | | | XP_001084536 | | | | |
| MmugDNA.9561.1.S1_at | TIMP-2 | tissue inhibitor of matrix | Mmu.1702 | XP_001106657 | 369.0166 | A | 492.1667 | P |
| | | metalloproteinase-2 | | | | | | |
| MmugDNA.502.1.S1_at | TIRAP | toll-interleukin 1 receptor (TIR) | Mmu.17493 | NP_001123907 /// | 205.38 | A | 169.1459 | P |
| | | domain containing adaptor | | XP_001112918 /// | | | | |
| | | protein | | XP_001112950 | | | | |
| MmugDNA.31314.1.S1_at | TMLHE | trimethyllysine hydroxylase, | Mmu.15229 | XP_001099467 /// | 183.9673 | A | 334.9409 | P |
| | | epsilon | | XP_001099575 /// | | | | |
| | | | | XP_001099674 | | | | |
| MmugDNA.86.1.S1_at | TRHDE | thyrotropin-releasing hormone | Mmu.130 | XP_001109391 | 53.7547 | A | 134.5263 | P |
| | | degrading enzyme | | | | | | |
| Mmu.5321.1.S1_at | TTC12 | tetratricopeptide repeat domain | Mmu.13011 | XP_001084384 /// | 108.8476 | A | 113.706 | P |
| | | 12 | | XP_001084508 /// | | | | |
| | | | | XP_001084630 /// | | | | |
| | | | | XP_001084748 /// | | | | |
| | | | | XP_001084868 /// | | | | |
| | | | | XP_001084979 | | | | |
| MmugDNA.33980.1.S1_at | TTLL4 | tubulin tyrosine ligase-like | Mmu.15909 | XP_001094019 /// | 273.2361 | A | 211.3274 | P |
| | | family, member 4 | | XP_001094615 /// | | | | |
| | | | | XP_001094742 /// | | | | |
| | | | | XP_001094864 | | | | |
| MmugDNA.20532.1.S1_at | WDR77 | WD repeat domain 77 | Mmu.4390 | XP_001105103 | 179.0304 | A | 343.9792 | P |
| MmugDNA.33665.1.S1_at | WDR8 | WD repeat domain 8 | Mmu.15190 | XP_001083578 /// | 178.8616 | A | 259.0192 | P |
| | | | | XP_001083787 /// | | | | |
| | | | | XP_001083904 /// | | | | |
| | | | | XP_001084011 | | | | |
| MmugDNA.26867.1.S1_at | XG | Xg blood group | Mmu.11499 | XP_001086077 /// | 29.58194 | A | 40.78949 | P |
| | | | | XP_001086193 | | | | |
| MmugDNA.19387.1.S1_at | ZDHHC3 | zinc finger, DHHC-type containing 3 | Mmu.11811 | XP_001114690 /// | 387.6217 | A | 606.2077 | P |
| | | | | XP_001114737 /// | | | | |
| | | | | XP_001114753 | | | | |
| MmugDNA.42763.1.S1_at | ZFAND5 | zinc finger, AN1-type domain 5 | Mmu.1639 | XP_001096078 /// | 2.943856 | A | 79.52551 | P |
| | | | | XP_001096191 /// | | | | |
| | | | | XP_001096312 /// | | | | |
| | | | | XP_001096433 /// | | | | |
| | | | | XP_001096545 | | | | |
| MmugDNA.29066.1.S1_at | ZNRD1 | zinc ribbon domain containing 1 | Mmu.17470 | NP_001108417 /// | 87.50885 | A | 97.50604 | P |
| | | | | XP_001105355 /// | | | | |
| | | | | XP_001105431 | | | | |

TABLE 2
Differentially expressed genes in PBMCs of NHPs 2-hr following MCAO

| Probe Set ID | Gene Symbol | Gene Title | UniGene ID | First ID Parsed | Pre-O Signal | Pre-O detection | 2-hr Signal | 2-hr detection |
|---|---|---|---|---|---|---|---|---|
| MmugDNA.2736.1.S1_at | C1QA | Complement component 1, q | Mmu.4861 | XP_001101655 | 182.484 | A | 150.6514 | P |
| | | subcomponent, A chain | | | | | | |
| MmugDNA.26392.1.S1_at | CCNF | cyclin F | Mmu.11675 | XP_001085466 | 114.6939 | A | 244.6208 | P |
| MmugDNA.25206.1.S1_at | CDC2 | cell division cycle 2, G1 to S and G2 | Mmu.16170 | XP_001095697 | 83.30299 | A | 74.22997 | P |
| | | to M | | | | | | |
| MmunewRS.528.1.S1_at | CSF2RB | colony stimulating factor 2 receptor, | Mmu.1176 | XP_001086084 | 146.8577 | A | 477.5113 | P |
| | | beta, low-affinity (granulocyte- | | | | | | |
| | | macrophage) | | | | | | |
| Mmu.15973.2.S1_x_at | CSH-3 /// CSH- | chorionic somatommamotropin | Mmu.10849 | NP_001036203 | 122.2181 | A | 172.7128 | P |
| | 4 /// GH1 /// | hormone 3 /// chorionic | | | | | | |
| | LOC718474 /// | somatommamotropin hormone 4 /// | | | | | | |
| | LOC721256 /// | growth hormone 1 /// similar to | | | | | | |
| | LOC735307 | growth hormone 1 isoform 1 /// | | | | | | |
| | | similar to growth hormone 1 isoform | | | | | | |
| | | 1 /// chorionic somatomammotropin-1 | | | | | | |
| MmugDNA.5060.1.S1_at | CTNND1 | catenin (cadherin-associated | Mmu.1419 | XP_001094621 | 79.00558 | A | 381.7483 | P |
| | | protein), delta 1 | | | | | | |
| MmugDNA.40586.1.S1_s_at | CYP3A5 /// | cytochrome P450, family 3, subfamily | Mmu.3065 | NP_001035309 | 176.8445 | A | 313.2471 | P |
| | CYP3A64 | A, polypeptide 5 /// cytochrome P450 | | | | | | |
| | | 3A64 | | | | | | |
| MmugDNA.1267.1.S1_s_at | CYP3A64 /// | cytochrome P450 3A64 /// similar to | Mmu.9706 | NP_001035504 | 89.83363 | A | 481.9885 | P |
| | LOC718917 | Cytochrome P450 3A7 (CYPIIIA7) | | | | | | |
| | | (P450-HFLA) | | | | | | |
| MmugDNA.13802.1.S1_at | DCN | decorin | Mmu.1687 | XP_001103412 | 52.87949 | A | 124.1306 | P |
| MmugDNA.14528.1.S1_s_at | DCN | decorin | Mmu.1687 | XP_001103412 | 107.5135 | A | 183.8077 | P |
| MmugDNA.41798.1.S1_at | DHRS7 | dehydrogenase/reductase (SDR | Mmu.4703 | XP_001095590 | 122.1582 | A | 208.7733 | P |
| | | family) member 7 | | | | | | |
| MmugDNA.620.1.S1_at | ENPP1 | ectonucleotide pyrophosphatase/phosphodiesterase 1 | Mmu.14518 | XP_001103359 | 50.47231 | A | 96.11094 | P |
| MmuSTS.4736.1.S1_at | ERBB3 | v-erb-b2 erythroblastic leukemia viral | Mmu.758 | XP_001113794 | 161.6664 | A | 208.198 | P |
| | | oncogene homolog 3 (avian) | | | | | | |
| MmugDNA.11377.1.S1_s_at | FCAR | Fc fragment of IgA, receptor for | Mmu.3792 | NP_001035039 | 196.9096 | A | 388.9353 | P |
| MmugDNA.33925.1.S1_s_at | FOXP2 | forkhead box P2 | Mmu.4784 | NP_001028193 | 204.0107 | A | 255.1464 | P |
| MmuSTS.4804.1.S1_at | FPR2 | formyl peptide receptor 2 | Mmu.15383 | XP_001116437 | 314.0186 | A | 1280.783 | P |
| MmugDNA.13746.1.S1_s_at | GK | glycerol kinase | Mmu.16427 | XP_001100778 | 21.59358 | A | 114.4026 | P |
| MmugDNA.37125.1.S1_at | GLRB | glycine receptor, beta | Mmu.1658 | XP_001093718 | 140.4933 | A | 274.4669 | P |
| Mmu.11695.1.S1_at | GPR34 | G protein-coupled receptor 34 | Mmu.3224 | XP_001087742 | 146.0326 | A | 147.7894 | P |
| MmuSTS.2489.1.S1_at | GPR77 | G protein-coupled receptor 77 | Mmu.15399 | XP_001112895 | 85.30246 | A | 286.7114 | P |
| MmuSTS.1348.1.S1_at | HOXB7 | homeobox B7 | Mmu.16913 | XP_001088822 | 134.1311 | A | 125.7572 | P |
| MmugDNA.18776.1.S1_at | HPD | 4-hydroxyphenylpyruvate | Mmu.14575 | XP_001096061 | 81.20009 | A | 294.6741 | P |
| | | dioxygenase | | | | | | |
| Mmu.15730.2.S1_at | HSP90AB1 | heat shock 90 kDa protein 1, beta | Mmu.142 | XP_001098219 | 97.19216 | A | 321.4503 | P |
| MmuSTS.681.1.S1_at | IL1RN | interleukin 1 receptor antagonist | Mmu.15827 | XP_001091493 | 108.0968 | A | 635.2902 | P |
| MmugDNA.28970.1.S1_at | IL1RN | interleukin 1 receptor antagonist | Mmu.15827 | XP_001091493 | 126.3157 | A | 511.0923 | P |
| Mmu.9316.1.S1_at | KLF11 | Kruppel-like factor 11 | Mmu.11355 | XP_001090608 | 501.1391 | A | 666.5593 | P |
| Mmu.1906.5.S1_s_at | LOC574146 | NKG2-A | Mmu.3577 | NP_001028001 | 12.69617 | A | 117.3456 | P |
| MmuSTS.1757.1.S1_at | LOC693556 | similar to ras responsive element | Mmu.14828 | XP_001082265 | 109.3152 | A | 232.5773 | P |
| | | binding protein 1 isoform 1 | | | | | | |
| MmugDNA.35637.1.S1_at | LOC694461 | similar to RIO kinase 1 isoform 1 | Mmu.13193 | XP_001084416 | 195.3009 | A | 132.0237 | P |
| MmugDNA.32349.1.S1_at | LOC694620 | similar to regulator of G-protein | Mmu.16259 | XP_001084439 | 49.87419 | A | 160.4138 | P |
| | | signalling 6 | | | | | | |
| MmugDNA.8053.1.S1_at | LOC694961 | Similar to Scm-like with four mbt | Mmu.13251 | XP_001084282 | 111.6069 | A | 141.3901 | P |
| | | domains 1 | | | | | | |
| MmugDNA.7498.1.S1_at | LOC695519 | hypothetical protein LOC695519 | Mmu.14586 | XP_001088156 | 103.4704 | A | 197.977 | P |
| MmugDNA.9916.1.S1_at | LOC696275 | similar to neuregulin 1 isoform HRG- | Mmu.16225 | XP_001085266 | 109.3953 | A | 190.929 | P |
| | | beta1 | | | | | | |
| MmugDNA.20065.1.S1_at | LOC696749 | similar to runt-related transcription | Mmu.14911 | XP_001086266 | 216.7346 | A | 328.7002 | P |
| | | factor 1 isoform a | | | | | | |
| MmugDNA.40590.1.S1_at | LOC696991 | similar to CG13322-PA, isoform A | Mmu.15342 | XP_001090213 | 151.6879 | A | 172.5933 | P |
| MmugDNA.23596.1.S1_at | LOC697028 | similar to dedicator of cytokinesis 7 | Mmu.4738 | XP_001085641 | 42.86666 | A | 115.8433 | P |
| MmugDNA.19209.1.S1_s_at | LOC697208 | similar to Neutrophil gelatinase-associated lipocalin | Mmu.11352 | XP_001083008 | 87.27077 | A | 98.78687 | P |
| | | precursor (NGAL) (p25) (25 kDa alpha-2-microglobulin- | | | | | | |
| | | related subunit of MMP-9) (Lipocalin-2) (Oncogene 24p3) | | | | | | |
| MmugDNA.34368.1.S1_at | LOC698257 | hypothetical protein LOC698257 | Mmu.14406 | XP_001091064 | 35.19047 | A | 47.13095 | P |
| MmugDNA.8688.1.S1_s_at | LOC698576 | similar to plakophilin 4 isoform a | Mmu.90 | XP_001090763 | 57.58762 | A | 168.3497 | P |
| MmugDNA.25652.1.S1_at | LOC698610 | similar to netrin-G1 ligand | Mmu.14852 | XP_001090221 | 159.8217 | A | 530.5047 | P |
| MmugDNA.7880.1.S1_at | LOC698922 | similar to transcription elongation | Mmu.1273 | XP_001087401 | 67.81429 | A | 124.0317 | P |
| | | factor B (SIII), polypeptide 1 | | | | | | |
| MmugDNA.30038.1.S1_at | LOC699233 | similar to J domain protein C21orf55 | Mmu.14908 | XP_001091149 | 20.38795 | A | 98.65044 | P |
| MmugDNA.6969.1.S1_s_at | LOC700634 | similar to PTK2 protein tyrosine | Mmu.3254 | XP_001091188 | 318.6551 | A | 400.0713 | P |
| | | kinase 2 isoform a | | | | | | |
| MmugDNA.11282.1.S1_at | LOC700766 | similar to CG14299-PA, isoform A | Mmu.13220 | XP_001089105 | 102.762 | A | 100.7975 | P |
| MmuSTS.1092.1.S1_at | LOC701162 | similar to solute carrier family 6, | Mmu.11269 | XP_001099500 | 62.05202 | A | 153.328 | P |
| | | member 17 | | | | | | |
| MmugDNA.24847.1.S1_at | LOC701547 | similar to glycine-N-acyltransferase- | Mmu.14222 | XP_001092072 | 104.8917 | A | 110.6059 | P |
| | | like 1 | | | | | | |
| MmugDNA.12356.1.S1_at | LOC702392 | similar to peroxin1 | Mmu.13262 | XP_001100851 | 267.6477 | A | 260.6007 | P |
| MmugDNA.30120.1.S1_at | LOC702596 | similar to nucleolar RNA-associated protein alpha isoform | Mmu.15669 | XP_001099108 | 517.206 | A | 746.5876 | P |
| MmugDNA.18234.1.S1_s_at | LOC703331 | similar to runt-related transcription | Mmu.14787 | XP_001100592 | 58.99397 | A | 143.8091 | P |
| | | factor 2 isoform b | | | | | | |
| MmugDNA.42623.1.S1_at | LOC703350 | Similar to SLD5 | Mmu.12445 | XP_001094432 | 116.1626 | A | 145.9785 | P |
| MmugDNA.28192.1.S1_at | LOC703449 | similar to solute carrier family 22 | Mmu.14760 | XP_001098823 | 85.29906 | A | 81.56317 | P |
| | | member 1 isoform a | | | | | | |
| MmugDNA.18415.1.S1_at | LOC703912 | similar to zinc-finger protein NOLZ1 | Mmu.16177 | XP_001095490 | 66.7701 | A | 146.8729 | P |
| MmugDNA.20879.1.S1_at | LOC703981 | similar to NOD9 protein isoform 1 | Mmu.15714 | XP_001104018 | 68.5675 | A | 154.5716 | P |
| MmugDNA.43058.1.S1_at | LOC704126 | similar to kinesin family member 13A | Mmu.14823 | XP_001096456 | 240.8623 | A | 408.3128 | P |
| MmugDNA.36952.1.S1_at | LOC704226 | similar to metallophosphoesterase 1 precursor | Mmu.1901 | XP_001095099 | 181.1201 | A | 250.6874 | P |
| MmugDNA.32338.1.S1_at | LOC704620 | Hypothetical protein LOC704620 | Mmu.12860 | XP_001092983 | 484.9445 | A | 1224.313 | P |
| MmugDNA.32288.1.S1_at | LOC705099 | similar to IBR domain containing 2 | Mmu.13564 | XP_001097834 | 169.2173 | A | 387.3177 | P |
| MmugDNA.13807.1.S1_at | LOC705221 | similar to CD2-associated protein | Mmu.14706 | XP_001103871 | 101.1595 | A | 127.5952 | P |
| MmugDNA.32676.1.S1_at | LOC705267 | similar to mitochondrial ribosomal | Mmu.4582 | XP_001093640 | 81.411 | A | 115.9029 | P |
| | | protein S5 | | | | | | |
| MmugDNA.3813.1.S1_at | LOC705358 | similar to PDZ and LIM domain 5 | Mmu.11535 | XP_001102789 | 196.3453 | A | 221.204 | P |
| | | isoform a | | | | | | |
| MmugDNA.41256.1.S1_at | LOC705369 | similar to SET domain containing 3 | Mmu.12527 | XP_001103146 | 307.612 | A | 241.3948 | P |
| MmugDNA.32069.1.S1_at | LOC705781 | similar to CG10721-PA | Mmu.11312 | XP_001098386 | 139.6408 | A | 183.3221 | P |
| MmugDNA.7008.1.S1_at | LOC705781 | similar to CG10721-PA | Mmu.11312 | XP_001098386 | 257.4816 | A | 322.0098 | P |
| MmugDNA.11389.1.S1_at | LOC705913 | similar to cytidine deaminase | Mmu.14713 | XP_001096632 | 157.2027 | A | 447.3467 | P |
| MmugDNA.31582.1.S1_at | LOC706263 | similar to potassium voltage-gated | Mmu.15899 | XP_001108426 | 64.51572 | A | 122.4288 | P |
| | | channel, Isk-related family, member 4 | | | | | | |
| MmugDNA.16996.1.S1_at | LOC706417 | similar to rap2 interacting protein x | Mmu.3060 | XP_001105219 | 77.67221 | A | 92.12048 | P |
| | | isoform 2 | | | | | | |
| MmugDNA.24929.1.S1_at | LOC707355 | similar to zinc finger protein 672 | Mmu.15300 | XP_001105495 | 160.5896 | A | 210.3326 | P |
| MmugDNA.21203.1.S1_x_at | LOC707383 | similar to amyloid beta (A4) | Mmu.669 | XP_001101993 | 428.4578 | A | 421.7363 | P |
| | | precursor protein-binding, family B, | | | | | | |
| | | member 1 interacting protein | | | | | | |
| MmugDNA.35674.1.S1_at | LOC707661 | similar to additional sex combs like 1 | Mmu.15484 | XP_001101400 | 110.2575 | A | 154.5192 | P |
| MmugDNA.14411.1.S1_at | LOC707686 | similar to angiogenic factor VG5Q | Mmu.12022 | XP_001106588 | 312.2592 | A | 323.3734 | P |
| MmuSTS.1472.1.S1_at | LOC707739 | Similar to serine/threonine protein | Mmu.12485 | XP_001096161 | 31.29481 | A | 62.03861 | P |
| | | kinase MASK | | | | | | |
| MmugDNA.6011.1.S1_at | LOC707982 /// | similar to rhomboid domain containing 1 /// hypothetical | Mmu.15898 | XP_001110015 | 253.2026 | A | 501.7335 | P |
| | LOC708189 | protein LOC708189 | | | | | | |
| MmuSTS.4837.1.S1_at | LOC708940 | similar to Guanine nucleotide-binding | Mmu.14862 | XP_001108555 | 67.89697 | A | 97.95885 | P |
| | | protein G(i), alpha-1 subunit | | | | | | |
| | | (Adenylate cyclase-inhibiting G alpha | | | | | | |
| | | protein) | | | | | | |
| MmuSTS.508.1.S1_at | LOC709049 | similar to activating signal | Mmu.14734 | XP_001105587 | 145.0563 | A | 157.3825 | P |
| | | cointegrator 1 complex subunit 1 | | | | | | |
| MmugDNA.32637.1.S1_at | LOC709253 | similar to nucleosomal binding | Mmu.13802 | XP_001103630 | 80.94846 | A | 62.59929 | P |
| | | protein 1 | | | | | | |
| MmugDNA.38015.1.S1_at | LOC709468 | similar to terminal | Mmu.12395 | XP_001107131 | 75.45173 | A | 95.06112 | P |
| | | deoxynucleotidyltransferase | | | | | | |
| | | interacting factor 1 | | | | | | |
| Mmu.10346.1.S1_at | LOC709544 | hypothetical protein LOC709544 | Mmu.16556 | XP_001096738 | 507.0977 | A | 355.7336 | P |
| MmugDNA.39938.1.S1_at | LOC709882 | similar to Troponin T, cardiac muscle | Mmu.14101 | XP_001098451 | 129.6782 | A | 195.8546 | P |
| | | (TnTc) (Cardiac muscle troponin T) | | | | | | |
| | | (cTnT) | | | | | | |
| MmugDNA.26478.1.S1_at | LOC710518 | similar to mitochondrial solute | Mmu.11000 | XP_001105927 | 455.317 | A | 1481.092 | P |
| | | carrier-like protein | | | | | | |
| MmugDNA.33876.1.S1_s_at | LOC711336 | similar to olfactomedin 2 | Mmu.15445 | XP_001099531 | 105.1338 | A | 181.6893 | P |
| MmugDNA.17217.1.S1_at | LOC711485 | similar to acyl-Coenzyme A | Mmu.12959 | XP_001109931 | 123.1174 | A | 379.9161 | P |
| | | dehydrogenase, long chain precursor | | | | | | |
| MmugDNA.15166.1.S1_at | LOC711633 | similar to zinc finger CCCH-type | Mmu.15988 | XP_001114089 | 185.2786 | A | 231.699 | P |
| | | containing 10 | | | | | | |
| MmuSTS.4200.1.S1_at | LOC711691 | Similar to pre-B-cell leukemia | Mmu.4832 | XP_001100529 | 105.6631 | A | 901.0759 | P |
| | | transcription factor 3 | | | | | | |
| Mmu.13564.1.S1_at | LOC711742 | similar to kinesin family member 9 | Mmu.564 | XP_001113416 | 8.346619 | A | 81.96733 | P |
| | | isoform 2 | | | | | | |
| MmugDNA.43479.1.S1_at | LOC711908 | similar to transmembrane 4 superfamily | Mmu.2535 | XP_001108758 | 8.667226 | A | 94.85152 | P |
| | | member 1 | | | | | | |
| MmugDNA.30723.1.S1_at | LOC711984 | Similar to zinc finger CCCH-type | Mmu.12594 | XP_001106124 | 175.1743 | A | 338.943 | P |
| | | domain containing 7 | | | | | | |
| MmugDNA.20892.1.S1_at | LOC712033 | similar to PCTAIRE protein kinase 1 | Mmu.14735 | XP_001100911 | 120.9395 | A | 203.3945 | P |
| MmugDNA.12728.1.S1_at | LOC712272 | similar to fibronectin type 3 and SPRY domain-containing | Mmu.13034 | XP_001109699 | 37.6952 | A | 88.71973 | P |
| | | protein | | | | | | |
| MmugDNA.1324.1.S1_s_at | LOC712600 | similar to quaking homolog, KH | Mmu.2689 | XP_001101642 | 109.0662 | A | 111.2004 | P |
| | | domain RNA binding isoform HQK-5 | | | | | | |
| MmugDNA.12133.1.S1_at | LOC713035 | similar to BCL2-like 1 isoform 1 | Mmu.16103 | XP_001109879 | 159.8234 | A | 120.8184 | P |
| MmugDNA.2816.1.S1_s_at | LOC713680 | similar to Protein C9orf7 | Mmu.11422 | XP_001100751 | 178.9342 | A | 371.2914 | P |
| MmugDNA.23412.1.S1_x_at | LOC715553 | similar to Protein PP2447 | Mmu.16050 | XP_001111734 | 651.9257 | A | 974.2084 | P |
| MmuSTS.563.1.S1_at | LOC715706 | Similar to schlafen family member 13 | Mmu.11333 | XP_001114176 | 47.03052 | A | 109.2105 | P |
| MmugDNA.40257.1.S1_at | LOC716245 | similar to sphingosine-1-phosphate | Mmu.4100 | XP_001106861 | 122.3767 | A | 155.0102 | P |
| | | lyase 1 | | | | | | |
| MmugDNA.36455.1.S1_at | LOC716351 | similar to SEC22 vesicle trafficking | Mmu.14967 | XP_001115262 | 162.7943 | A | 203.9004 | P |
| | | protein homolog C isoform b | | | | | | |
| MmugDNA.2703.1.S1_at | LOC716903 | hypothetical protein LOC716903 | Mmu.15043 | XP_001115326 | 21.5953 | A | 72.00944 | P |
| Mmu.8945.1.S1_at | LOC717346 | similar to complement factor H | Mmu.4677 | XP_001111499 | 90.61079 | A | 186.3635 | P |
| | | isoform a precursor | | | | | | |
| MmugDNA.22554.1.S1_s_at | LOC717764 | similar to phospholipase C, beta 3 | Mmu.11823 | XP_001115104 | 294.9439 | A | 257.2195 | P |
| | | (phosphatidylinositol-specific) | | | | | | |
| MmugDNA.41138.1.S1_at | LOC717824 | similar to mago-nashi homolog | Mmu.2413 | XP_001115401 | 56.18679 | A | 108.1663 | P |
| MmugDNA.8485.1.S1_at | LOC719645 | similar to H326 | Mmu.153 | XP_001117421 | 55.48396 | A | 122.239 | P |
| MmuSTS.2495.1.S1_at | LOC719814 | similar to zinc finger protein 577 | Mmu.15382 | XP_001116472 | 105.0435 | A | 132.2027 | P |
| MmugDNA.11286.1.S1_at | LOC720186 | similar to immunoglobulin superfamily, member 8 | Mmu.11138 | XP_001115307 | 385.697 | A | 486.4542 | P |
| MmugDNA.1499.1.S1_at | LOC721262 | similar to Pigment epithelium-derived | Mmu.12605 | XP_001117361 | 90.36726 | A | 283.4944 | P |
| | | factor precursor (PEDF) (EPC-1) | | | | | | |
| MmugDNA.16852.1.S1_at | LTB4R | leukotriene B4 receptor | — | XP_001114016 | 97.06477 | A | 397.0128 | P |
| MmugDNA.21143.1.S1_at | MAOA | monoamine oxidase A | Mmu.3283 | XP_001096840 | 127.6487 | A | 386.7567 | P |
| MmugDNA.20648.1.S1_at | MFAP3 | microfibrillar-associated protein 3 | Mmu.1139 | XP_001102567 | 209.1429 | A | 191.3753 | P |
| MmugDNA.17553.1.S1_at | MMP19 | matrix metallopeptidase 19 | — | XP_001111542 | 95.18174 | A | 126.3377 | P |
| MmuSTS.4170.1.S1_at | MRAS | muscle RAS oncogene homolog | Mmu.14559 | XP_001114261 | 150.9189 | A | 140.7781 | P |
| MmugDNA.13215.1.S1_at | MYO5B | myosin VB | Mmu.15475 | XP_001090434 | 76.57364 | A | 115.3176 | P |
| MmugDNA.26632.1.S1_at | NMNAT3 | nicotinamide nucleotide | Mmu.14941 | XP_001113328 | 100.2686 | A | 157.8669 | P |
| | | adenylyltransferase 3 | | | | | | |
| MmugDNA.28543.1.S1_at | NR4A2 | Nuclear receptor subfamily 4, group | Mmu.11507 | XP_001085438 | 67.00845 | A | 47.1474 | P |
| | | A, member 2 | | | | | | |
| Mmu.14635.1.S1_s_at | P11 | placental protein 11 | Mmu.1192 | XP_001097398 | 3.029125 | A | 85.42168 | P |
| MmugDNA.7677.1.S1_at | RBM34 | RNA binding motif protein 34 | Mmu.12653 | XP_001102020 | 139.6196 | A | 191.8863 | P |
| MmugDNA.17401.1.S1_at | SEC24A | SEC24 family, member A (S. cerevisiae) | Mmu.13387 | XP_001109569 | 32.50195 | A | 145.5821 | P |
| MmugDNA.34347.1.S1_s_at | SLC25A13 | solute carrier family 25, member 13 | Mmu.11416 | XP_001088340 | 83.63106 | A | 83.29261 | P |
| | | (citrin) | | | | | | |
| MmugDNA.15062.1.S1_at | SSBP1 | Single-stranded DNA binding protein 1 | Mmu.4481 | XP_001084058 | 129.9467 | A | 251.779 | P |
| MmugDNA.26812.1.S1_at | ST8SIA4 | ST8 alpha-N-acetyl-neuraminide alpha-2,8- | Mmu.13440 | XP_001097339 | 135.5056 | A | 100.6624 | P |
| | | sialyltransferase 4 | | | | | | |
| MmugDNA.9561.1.S1_at | TIMP-2 | tissue inhibitor of matrix | Mmu.1702 | XP_001106657 | 369.0166 | A | 579.6535 | P |
| | | metalloproteinase-2 | | | | | | |
| MmugDNA.86.1.S1_at | TRHDE | thyrotropin-releasing hormone | Mmu.130 | XP_001109391 | 53.7547 | A | 145.0238 | P |
| | | degrading enzyme | | | | | | |
| Mmu.5321.1.S1_at | TTC12 | tetratricopeptide repeat domain 12 | Mmu.13011 | XP_001084384 | 108.8476 | A | 283.5953 | P |
| MmugDNA.33980.1.S1_at | TTLL4 | tubulin tyrosine ligase-like family, | Mmu.15909 | XP_001094019 | 273.2361 | A | 188.5919 | P |
| | | member 4 | | | | | | |
| MmugDNA.20532.1.S1_at | WDR77 | WD repeat domain 77 | Mmu.4390 | XP_001105103 | 179.0304 | A | 608.6301 | P |
| MmugDNA.33665.1.S1_at | WDR8 | WD repeat domain 8 | Mmu.15190 | XP_001083578 | 178.8616 | A | 467.1802 | P |
| MmugDNA.19387.1.S1_at | ZDHHC3 | zinc finger, DHHC-type containing 3 | Mmu.11811 | XP_001114690 | 387.6217 | A | 769.4366 | P |
| MmugDNA.42763.1.S1_at | ZFAND5 | zinc finger, AN1-type domain 5 | Mmu.1639 | XP_001096078 | 2.943856 | A | 141.202 | P |

TABLE 3
Differentially expressed genes in PBMCs of NHPs 24-hr following MCAO

| Probe Set ID | Gene Symbol | Gene Title | UniGene ID | RefSeq Protein ID | Pre-O Signal | Pre-O detection | 24 hr Signal | 24-hr detection |
|---|---|---|---|---|---|---|---|---|
| MmuSTS.3785.1.S1_at | AGT | angiotensinogen | Mmu.11931 | XP_001107315 /// | 53.05984 | A | 121.1526 | P |
| | | | | XP_001107374 | | | | |
| MmugDNA.18724.1.S1_s_at | B4GALT6 | UDP-Gal:betaGlcNAc beta 1,4-galactosyltransferase, | Mmu.604 | XP_001099215 /// | 58.75183 | A | 80.2387 | P |
| | | polypeptide 6 | | XP_001099324 /// | | | | |
| | | | | XP_001099421 | | | | |
| Mmu.7394.1.A1_at | BXDC1 | Brix domain containing 1 | Mmu.2348 | XP_001087115 | 93.25996 | A | 98.8365 | P |
| MmugDNA.2736.1.S1_at | C1QA | Complement component 1, q subcomponent, A chain | Mmu.4861 | XP_001101655 /// | 182.484 | A | 177.6559 | P |
| | | | | XP_001101750 /// | | | | |
| | | | | XP_001101837 /// | | | | |
| | | | | XP_001101933 | | | | |
| MmugDNA.26392.1.S1_at | CCNF | cyclin F | Mmu.11675 | XP_001085466 | 114.6939 | A | 287.1454 | P |
| MmugDNA.25206.1.S1_at | CDC2 | cell division cycle 2, G1 to S and | Mmu.16170 | XP_001095697 /// | 83.30299 | A | 82.88945 | P |
| | | G2 to M | | XP_001095798 /// | | | | |
| | | | | XP_001095903 | | | | |
| Mmu.10362.1.S1_at | CLIC4 | chloride intracellular channel 4 | Mmu.4332 | XP_001106291 /// | 131.4646 | A | 115.3725 | P |
| | | | | XP_001106424 /// | | | | |
| | | | | XP_001106485 | | | | |
| MmuSTS.1884.1.S1_at | CREM | cAMP responsive element | Mmu.2805 | XP_001088641 /// | 144.2539 | A | 153.9597 | P |
| | | modulator | | XP_001088747 /// | | | | |
| | | | | XP_001088981 /// | | | | |
| | | | | XP_001089092 /// | | | | |
| | | | | XP_001089667 /// | | | | |
| | | | | XP_001090015 /// | | | | |
| | | | | XP_001090136 /// | | | | |
| | | | | XP_001090248 /// | | | | |
| | | | | XP_001090366 /// | | | | |
| | | | | XP_001090477 /// | | | | |
| | | | | XP_001090595 /// | | | | |
| | | | | XP_001090829 /// | | | | |
| | | | | XP_001091190 /// | | | | |
| | | | | XP_001091309 /// | | | | |
| | | | | XP_001091547 /// | | | | |
| | | | | XP_001091662 /// | | | | |
| | | | | XP_001092258 /// | | | | |
| | | | | XP_001092367 /// | | | | |
| | | | | XP_001092480 /// | | | | |
| | | | | XP_001092602 /// | | | | |
| | | | | XP_001092837 /// | | | | |
| | | | | XP_001092950 /// | | | | |
| | | | | XP_001093063 /// | | | | |
| | | | | XP_001093168 | | | | |
| MmugDNA.1202.1.S1_at | CRKL | V-crk sarcoma virus CT10 | Mmu.12764 | XP_001086006 /// | 92.14868 | A | 181.7126 | P |
| | | oncogene homolog (avian)-like | | XP_001086123 | | | | |
| MmunewRS.528.1.S1_at | CSF2RB | colony stimulating factor 2 | Mmu.1176 | XP_001086084 | 146.8577 | A | 237.7413 | P |
| | | receptor, beta, low-affinity | | | | | | |
| | | (granulocyte-macrophage) | | | | | | |
| Mmu.15973.2.S1_x_at | CSH-3 /// | chorionic somatommamotropin | Mmu.10849 | NP_001036203 /// | 122.2181 | A | 167.5703 | P |
| | CSH-4 /// | hormone 3 /// chorionic | | NP_001036207 /// | | | | |
| | GH1 /// | somatommamotropin hormone 4 | | NP_001040618 /// | | | | |
| | LOC718474 | /// growth hormone 1 /// similar | | NP_001040620 /// | | | | |
| | /// | to growth hormone 1 isoform 1 | | XP_001111200 /// | | | | |
| | LOC721256 | /// similar to growth hormone 1 | | XP_001116436 /// | | | | |
| | /// | isoform 1 /// chorionic | | XP_001117351 | | | | |
| | LOC735307 | somatomammotropin-1 | | | | | | |
| MmugDNA.5060.1.S1_at | CTNND1 | catenin (cadherin-associated protein), delta 1 | Mmu.1419 | XP_001094621 /// | 79.00558 | A | 247.8638 | P |
| | | | | XP_001095087 /// | | | | |
| | | | | XP_001095314 /// | | | | |
| | | | | XP_001095429 /// | | | | |
| | | | | XP_001095545 /// | | | | |
| | | | | XP_001095646 /// | | | | |
| | | | | XP_001095745 /// | | | | |
| | | | | XP_001095859 /// | | | | |
| | | | | XP_001095967 /// | | | | |
| | | | | XP_001096070 /// | | | | |
| | | | | XP_001096183 /// | | | | |
| | | | | XP_001096303 /// | | | | |
| | | | | XP_001096427 /// | | | | |
| | | | | XP_001096539 /// | | | | |
| | | | | XP_001096644 /// | | | | |
| | | | | XP_001096747 /// | | | | |
| | | | | XP_001096864 /// | | | | |
| | | | | XP_001096974 /// | | | | |
| | | | | XP_001097086 /// | | | | |
| | | | | XP_001097202 /// | | | | |
| | | | | XP_001097299 /// | | | | |
| | | | | XP_001097408 /// | | | | |
| | | | | XP_001097505 /// | | | | |
| | | | | XP_001097599 /// | | | | |
| | | | | XP_001097712 /// | | | | |
| | | | | XP_001097810 /// | | | | |
| | | | | XP_001097908 /// | | | | |
| | | | | XP_001097998 /// | | | | |
| | | | | XP_001098090 /// | | | | |
| | | | | XP_001098194 /// | | | | |
| | | | | XP_001098301 /// | | | | |
| | | | | XP_001098398 /// | | | | |
| | | | | XP_001098491 /// | | | | |
| | | | | XP_001098588 /// | | | | |
| | | | | XP_001098689 /// | | | | |
| | | | | XP_001098792 /// | | | | |
| | | | | XP_001098897 /// | | | | |
| | | | | XP_001098993 /// | | | | |
| | | | | XP_001099102 /// | | | | |
| | | | | XP_001099203 /// | | | | |
| | | | | XP_001099314 /// | | | | |
| | | | | XP_001099411 /// | | | | |
| | | | | XP_001099522 /// | | | | |
| | | | | XP_001099613 /// | | | | |
| | | | | XP_001099715 /// | | | | |
| | | | | XP_001099819 /// | | | | |
| | | | | XP_001099920 | | | | |
| MmugDNA.40586.1.S1_s_at | CYP3A5 /// | cytochrome P450, family 3, | Mmu.3065 | NP_001035309 /// | 176.8445 | A | 370.1329 | P |
| | CYP3A64 | subfamily A, polypeptide 5 /// cytochrome P450 3A64 | | NP_001035504 /// | | | | |
| | | | | XP_001096666 /// | | | | |
| | | | | XP_001097621 /// | | | | |
| | | | | XP_001097930 | | | | |
| MmugDNA.1267.1.S1_s_at | CYP3A64 /// | cytochrome P450 3A64 /// | Mmu.9706 | NP_001035504 /// | 89.83363 | A | 267.5797 | P |
| | LOC718917 | similar to Cytochrome P450 3A7 (CYPIIIA7) (P450- | | XP_001097930 /// | | | | |
| | | HFLA) | | XP_001112281 | | | | |
| MmugDNA.36232.1.S1_at | DAB2 | disabled homolog 2 | Mmu.12958 | XP_001084792 | 72.17534 | A | 157.0555 | P |
| MmugDNA.41396.1.S1_at | DAB2 | disabled homolog 2 | Mmu.12958 | XP_001084792 | 86.95129 | A | 159.1484 | P |
| MmugDNA.13802.1.S1_at | DCN | decorin | Mmu.1687 | XP_001103412 /// | 52.87949 | A | 70.88836 | P |
| | | | | XP_001103495 /// | | | | |
| | | | | XP_001103577 /// | | | | |
| | | | | XP_001103663 /// | | | | |
| | | | | XP_001103749 /// | | | | |
| | | | | XP_001103834 /// | | | | |
| | | | | XP_001103918 /// | | | | |
| | | | | XP_001104009 /// | | | | |
| | | | | XP_001104095 /// | | | | |
| | | | | XP_001104178 /// | | | | |
| | | | | XP_001104261 /// | | | | |
| | | | | XP_001104340 | | | | |
| MmugDNA.14528.1.S1_s_at | DCN | decorin | Mmu.1687 | XP_001103412 /// | 107.5135 | A | 179.9101 | P |
| | | | | XP_001103495 /// | | | | |
| | | | | XP_001103577 /// | | | | |
| | | | | XP_001103663 /// | | | | |
| | | | | XP_001103749 /// | | | | |
| | | | | XP_001103834 /// | | | | |
| | | | | XP_001103918 /// | | | | |
| | | | | XP_001104009 /// | | | | |
| | | | | XP_001104095 /// | | | | |
| | | | | XP_001104178 /// | | | | |
| | | | | XP_001104261 /// | | | | |
| | | | | XP_001104340 | | | | |
| MmugDNA.22700.1.S1_at | DCN | decorin | Mmu.1687 | XP_001103412 /// | 120.1081 | A | 301.5998 | P |
| | | | | XP_001103495 /// | | | | |
| | | | | XP_001103577 /// | | | | |
| | | | | XP_001103663 /// | | | | |
| | | | | XP_001103749 /// | | | | |
| | | | | XP_001103834 /// | | | | |
| | | | | XP_001103918 /// | | | | |
| | | | | XP_001104009 /// | | | | |
| | | | | XP_001104095 /// | | | | |
| | | | | XP_001104178 /// | | | | |
| | | | | XP_001104261 /// | | | | |
| | | | | XP_001104340 | | | | |
| MmugDNA.41798.1.S1_at | DHRS7 | dehydrogenase/reductase (SDR | Mmu.4703 | XP_001095590 /// | 122.1582 | A | 206.1407 | P |
| | | family) member 7 | | XP_001095688 /// | | | | |
| | | | | XP_001095790 | | | | |
| MmugDNA.30768.1.S1_at | DOCK6 | dedicator of cytokinesis 6 | Mmu.14293 | XP_001106785 | 19.43518 | A | 178.1556 | P |
| MmugDNA.26154.1.S1_at | DRD2 | dopamine receptor D2 | Mmu.3401 | XP_001085336 /// | 94.5069 | A | 196.3607 | P |
| | | | | XP_001085449 /// | | | | |
| | | | | XP_001085571 | | | | |
| Mmu.10947.1.A1_at | DUSP3 | Dual specificity phosphatase 3 | Mmu.11380 | XP_001113728 /// | 98.48205 | A | 192.5923 | P |
| | | | | XP_001113754 | | | | |
| MmugDNA.26188.1.S1_at | ECEL1 | endothelin converting enzyme- | Mmu.11796 | XP_001117070 | 178.3571 | A | 167.7575 | P |
| | | like 1 | | | | | | |
| MmugDNA.32487.1.S1_s_at | ELA3B | elastase 3B | Mmu.3417 | XP_001099601 | 53.45941 | A | 207.1332 | P |
| MmugDNA.38477.1.S1_at | ELK4 | ELK4, ETS-domain protein (SRF | — | XP_001087748 | 144.6712 | A | 96.148 | P |
| | | accessory protein 1) | | | | | | |
| MmugDNA.620.1.S1_at | ENPP1 | ectonucleotide | Mmu.14518 | XP_001103359 | 50.47231 | A | 103.8725 | P |
| | | pyrophosphatase/phosphodiesterase 1 | | | | | | |
| MmugDNA.27688.1.S1_at | EPOR | erythropoietin receptor | — | XP_001105833 | 188.3416 | A | 259.7 | P |
| MmugDNA.10912.1.S1_at | ERBB3 | v-erb-b2 erythroblastic leukemia | Mmu.758 | XP_001113794 /// | 103.4474 | A | 195.9001 | P |
| | | viral oncogene homolog 3 | | XP_001113900 /// | | | | |
| | | (avian) | | XP_001113928 /// | | | | |
| | | | | XP_001113953 | | | | |
| MmuSTS.4736.1.S1_at | ERBB3 | v-erb-b2 erythroblastic leukemia viral oncogene homolog 3 | Mmu.758 | XP_001113794 /// | 161.6664 | A | 289.3541 | P |
| | | | | XP_001113900 /// | | | | |
| | | (avian) | | XP_001113928 /// | | | | |
| | | | | XP_001113953 | | | | |
| MmuSTS.2627.1.S1_at | EXTL1 | exostoses (multiple)-like 1 | Mmu.15170 | XP_001108035 /// | 62.74446 | A | 177.0561 | P |
| | | | | XP_001108149 /// | | | | |
| | | | | XP_001108202 | | | | |
| MmugDNA.18128.1.S1_at | F7 | coagulation factor VII | Mmu.11080 | NP_001073605 /// | 95.21188 | A | 208.6877 | P |
| | | | | XP_001118128 | | | | |
| MmugDNA.11377.1.S1_s_at | FCAR | Fc fragment of IgA, receptor for | Mmu.3792 | NP_001035039 | 196.9096 | A | 296.4183 | P |
| MmugDNA.19608.1.S1_at | FGB | fibrinogen beta chain | Mmu.11581 | XP_001091417 /// | 35.28459 | A | 142.7827 | P |
| | | | | XP_001091760 /// | | | | |
| | | | | XP_001091882 /// | | | | |
| | | | | XP_001091998 | | | | |
| MmuSTS.4781.1.S1_at | FKBP10 | FK506 binding protein 10, 65 kDa | Mmu.14407 | XP_001107581 /// | 144.692 | A | 206.9655 | P |
| | | | | XP_001107638 /// | | | | |
| | | | | XP_001107696 /// | | | | |
| | | | | XP_001107756 /// | | | | |
| | | | | XP_001107821 | | | | |
| MmugDNA.33925.1.S1_s_at | FOXP2 | forkhead box P2 | Mmu.4784 | NP_001028193 | 204.0107 | A | 286.409 | P |
| MmuSTS.4804.1.S1_at | FPR2 | formyl peptide receptor 2 | Mmu.15383 | XP_001116437 /// | 314.0186 | A | 738.5731 | P |
| | | | | XP_001116445 /// | | | | |
| | | | | XP_001116452 | | | | |
| MmuSTS.4807.1.S1_at | FUT3 | fucosyltransferase 3 (galactoside | Mmu.11521 | XP_001085818 /// | 130.1834 | A | 194.3972 | P |
| | | 3(4)-L-fucosyltransferase, Lewis blood group) | | XP_001085924 | | | | |
| MmuSTS.4814.1.S1_at | GABRE | gamma-aminobutyric acid | Mmu.15237 | XP_001093070 /// | 61.50348 | A | 144.2998 | P |
| | | (GABA) A receptor, epsilon | | XP_001093507 /// | | | | |
| | | | | XP_001093628 /// | | | | |
| | | | | XP_001093865 | | | | |
| MmugDNA.22053.1.S1_at | GGCX | gamma-glutamyl carboxylase | Mmu.13911 | XP_001086016 /// | 309.7049 | A | 434.7215 | P |
| | | | | XP_001086474 | | | | |
| MmugDNA.13746.1.S1_s_at | GK | glycerol kinase | Mmu.16427 | XP_001100778 /// | 21.59358 | A | 147.123 | P |
| | | | | XP_001100861 /// | | | | |
| | | | | XP_001100968 | | | | |
| MmugDNA.37125.1.S1_at | GLRB | glycine receptor, beta | Mmu.1658 | XP_001093718 /// | 140.4933 | A | 260.0455 | P |
| | | | | XP_001093832 | | | | |
| Mmu.8905.1.S1_at | GPD1 | glycerol-3-phosphate dehydrogenase 1 | Mmu.3010 | XP_001102726 | 70.93366 | A | 227.4083 | P |
| | | (soluble) | | | | | | |
| Mmu.11695.1.S1_at | GPR34 | G protein-coupled receptor 34 | Mmu.3224 | XP_001087742 /// | 146.0326 | A | 141.9543 | P |
| | | | | XP_001087858 /// | | | | |
| | | | | XP_001087981 /// | | | | |
| | | | | XP_001088105 | | | | |
| MmuSTS.2489.1.S1_at | GPR77 | G protein-coupled receptor 77 | Mmu.15399 | XP_001112895 /// | 85.30246 | A | 324.2143 | P |
| | | | | XP_001112923 /// | | | | |
| | | | | XP_001112956 | | | | |
| MmugDNA.19343.1.S1_s_at | HBG2 | hemoglobin, gamma G | Mmu.2134 | NP_001040611 /// | 36.8732 | A | 92.44987 | P |
| | | | | XP_001111590 | | | | |
| MmugDNA.7761.1.S1_at | HIPK2 | homeodomain interacting protein | Mmu.4514 | XP_001106719 | 112.2257 | A | 349.4229 | P |
| | | kinase 2 | | | | | | |
| MmugDNA.27045.1.S1_at | HOMER1 | homer homolog 1 (Drosophila) | Mmu.16400 | XP_001108808 /// | 59.80412 | A | 82.8224 | P |
| | | | | XP_001108859 /// | | | | |
| | | | | XP_001108899 /// | | | | |
| | | | | XP_001108946 /// | | | | |
| | | | | XP_001109003 /// | | | | |
| | | | | XP_001109058 /// | | | | |
| | | | | XP_001109116 /// | | | | |
| | | | | XP_001109170 | | | | |
| MmuSTS.1348.1.S1_at | HOXB7 | homeobox B7 | Mmu.16913 | XP_001088822 | 134.1311 | A | 124.6616 | P |
| MmugDNA.18776.1.S1_at | HPD | 4-hydroxyphenylpyruvate | Mmu.14575 | XP_001096061 /// | 81.20009 | A | 312.6377 | P |
| | | dioxygenase | | XP_001096175 | | | | |
| Mmu.15730.2.S1_at | HSP90AB1 | heat shock 90 kDa protein 1, | Mmu.142 | XP_001098219 /// | 97.19216 | A | 432.5437 | P |
| | | beta | | XP_001098426 /// | | | | |
| | | | | XP_001098520 /// | | | | |
| | | | | XP_001098716 /// | | | | |
| | | | | XP_001098925 /// | | | | |
| | | | | XP_001099027 /// | | | | |
| | | | | XP_001099135 /// | | | | |
| | | | | XP_001099237 /// | | | | |
| | | | | XP_001099339 /// | | | | |
| | | | | XP_001099439 | | | | |
| MmugDNA.28970.1.S1_at | IL1RN | interleukin 1 receptor antagonist | Mmu.15827 | XP_001091493 /// | 126.3157 | A | 202.4636 | P |
| | | | | XP_001091717 /// | | | | |
| | | | | XP_001091833 | | | | |
| MmuSTS.681.1.S1_at | IL1RN | interleukin 1 receptor antagonist | Mmu.15827 | XP_001091493 /// | 108.0968 | A | 347.2209 | P |
| | | | | XP_001091717 /// | | | | |
| | | | | XP_001091833 | | | | |
| MmugDNA.7719.1.S1_at | IL4I1 | interleukin 4 induced 1 | Mmu.15390 | XP_001115731 /// | 122.4228 | A | 134.9988 | P |
| | | | | XP_001115739 /// | | | | |
| | | | | XP_001115750 /// | | | | |
| | | | | XP_001115759 /// | | | | |
| | | | | XP_001115764 /// | | | | |
| | | | | XP_001115773 | | | | |
| MmugDNA.21962.1.S1_at | INHBA | inhibin, beta A | — | XP_001098421 /// | 5.461364 | A | 66.77403 | P |
| | | | | XP_001098514 | | | | |
| MmugDNA.41698.1.S1_at | ITGA6 | Integrin, alpha 6 | Mmu.11085 | XP_001086200 | 175.6256 | A | 326.1319 | P |
| MmuSTS.4395.1.S1_at | ITGA9 | integrin, alpha 9 | — | XP_001086555 | 12.68558 | A | 106.7995 | P |
| MmugDNA.36020.1.S1_at | ITGB5 | integrin, beta 5 | Mmu.1239 | XP_001113831 /// | 118.9835 | A | 287.9891 | P |
| | | | | XP_001113881 /// | | | | |
| | | | | XP_001113909 | | | | |
| MmugDNA.33524.1.S1_at | JAG1 | jagged 1 | Mmu.16088 | XP_001116216 | 33.29051 | A | 158.451 | P |
| MmugDNA.25725.1.S1_at | KCNE1 | potassium voltage-gated channel, Isk-related | Mmu.14910 | XP_001088840 /// | 8.312235 | A | 125.2664 | P |
| | | family, member 1 | | XP_001088944 /// | | | | |
| | | | | XP_001089061 /// | | | | |
| | | | | XP_001089178 | | | | |
| MmugDNA.2200.1.S1_s_at | KCNJ13 | potassium inwardly-rectifying | Mmu.11590 | XP_001114522 /// | 80.08498 | A | 118.0615 | P |
| | | channel, subfamily J, member 13 | | XP_001114542 | | | | |
| Mmu.7460.6.S1_x_at | KIR3DH5 | killer-cell Ig-like receptor | Mmu.17415 | NP_001098643 | 251.4261 | A | 142.5331 | P |
| | | KIR3DH5 | | | | | | |
| Mmu.7460.12.S1_x_at | KIR3DL10 | killer immunoglobulin-like | Mmu.17259 | NP_001098640 | 1.215597 | A | 128.9819 | P |
| | | receptor KIR3DL10 | | | | | | |
| Mmu.9316.1.S1_at | KLF11 | Kruppel-like factor 11 | Mmu.11355 | XP_001090608 | 501.1391 | A | 598.1434 | P |
| MmugDNA.33624.1.S1_at | KLK15 | kallikrein-related peptidase 15 | Mmu.15386 | XP_001116155 /// | 58.26991 | A | 165.5999 | P |
| | | | | XP_001116159 /// | | | | |
| | | | | XP_001116169 /// | | | | |
| | | | | XP_001116177 /// | | | | |
| | | | | XP_001116190 /// | | | | |
| | | | | XP_001116199 /// | | | | |
| | | | | XP_001116226 /// | | | | |
| | | | | XP_001116235 | | | | |
| MmugDNA.40811.1.S1_at | KSR1 | kinase suppressor of ras | Mmu.2049 | XP_001105629 | 92.95608 | A | 89.93006 | P |
| MmuSTS.385.1.S1_at | LMO1 | LIM domain only 1 (rhombotin 1) | Mmu.14044 | XP_001105032 /// | 84.15849 | A | 209.9162 | P |
| | | | | XP_001105198 /// | | | | |
| | | | | XP_001105265 | | | | |
| MmuSTS.1666.1.S1_at | LNX1 | ligand of numb-protein X 1 | Mmu.16462 | XP_001090921 /// | 104.5588 | A | 155.7875 | P |
| | | | | XP_001091044 /// | | | | |
| | | | | XP_001091164 | | | | |
| Mmu.7390.1.S1_at | LOC574134 | VAMP-2 | Mmu.3489 | NP_001027992 | 220.164 | A | 376.094 | P |
| Mmu.1906.5.S1_s_at | LOC574146 | NKG2-A | Mmu.3577 | NP_001028001 | 12.69617 | A | 90.53711 | P |
| MmugDNA.15100.1.S1_at | LOC693289 | Similar to ATP-binding cassette, sub-family A | Mmu.12529 | XP_001082244 /// | 7.136568 | A | 109.7202 | P |
| | | member 8 | | XP_001082492 /// | | | | |
| | | | | XP_001082622 | | | | |
| MmuSTS.1757.1.S1_at | LOC693556 | similar to ras responsive element binding protein | Mmu.14828 | XP_001082265 /// | 109.3152 | A | 122.6399 | P |
| | | 1 isoform 1 | | XP_001082516 /// | | | | |
| | | | | XP_001082652 /// | | | | |
| | | | | XP_001082784 /// | | | | |
| | | | | XP_001082911 | | | | |
| MmugDNA.20287.1.S1_at | LOC693696 | similar to longevity assurance homolog 2 | Mmu.16301 | XP_001082530 /// | 9.598577 | A | 92.75128 | P |
| | | | | XP_001082667 /// | | | | |
| | | | | XP_001082802 | | | | |
| MmugDNA.12459.1.S1_at | LOC693821 | similar to THAP domain | Mmu.11226 | XP_001086766 | 33.44794 | A | 97.39143 | P |
| | | containing 7 | | | | | | |
| MmugDNA.17057.1.S1_at | LOC694043 | Similar to RECK protein | Mmu.12983 | XP_001083242 /// | 36.28584 | A | 106.7528 | P |
| | | precursor | | XP_001083599 | | | | |
| MmugDNA.14488.1.S1_at | LOC694192 | similar to Protein C18orf54 | Mmu.15470 | XP_001082497 /// | 158.6407 | A | 146.8237 | P |
| | | precursor | | XP_001082628 /// | | | | |
| | | | | XP_001082761 | | | | |
| MmugDNA.32899.1.S1_at | LOC694220 | similar to glutathione S-transferase, | Mmu.16453 | XP_001083156 /// | 151.0824 | A | 165.4515 | P |
| | | C-terminal domain containing isoform 1 | | XP_001083273 /// | | | | |
| | | | | XP_001083401 | | | | |
| MmugDNA.35637.1.S1_at | LOC694461 | similar to RIO kinase 1 isoform 1 | Mmu.13193 | XP_001084416 /// | 195.3009 | A | 347.8302 | P |
| | | | | XP_001084537 /// | | | | |
| | | | | XP_001084661 | | | | |
| MmugDNA.32349.1.S1_at | LOC694620 | similar to regulator of G-protein signalling 6 | Mmu.16259 | XP_001084439 /// | 49.87419 | A | 116.6921 | P |
| | | | | XP_001084557 /// | | | | |
| | | | | XP_001084681 | | | | |
| MmugDNA.31733.1.S1_at | LOC694857 | similar to Ca2+-dependent activator protein | Mmu.14856 | XP_001083727 /// | 89.40633 | A | 66.00955 | P |
| | | for secretion 2 isoform b | | XP_001083836 /// | | | | |
| | | | | XP_001083951 /// | | | | |
| | | | | XP_001084057 /// | | | | |
| | | | | XP_001084178 /// | | | | |
| | | | | XP_001084294 /// | | | | |
| | | | | XP_001084413 | | | | |
| MmugDNA.8053.1.S1_at | LOC694961 | Similar to Scm-like with four mbt domains 1 | Mmu.13251 | XP_001084282 /// | 111.6069 | A | 98.00121 | P |
| | | | | XP_001084404 /// | | | | |
| | | | | XP_001084525 /// | | | | |
| | | | | XP_001084648 /// | | | | |
| | | | | XP_001084766 /// | | | | |
| | | | | XP_001084884 /// | | | | |
| | | | | XP_001084999 | | | | |
| MmugDNA.7498.1.S1_at | LOC695519 | hypothetical protein LOC695519 | Mmu.14586 | XP_001088156 | 103.4704 | A | 190.2334 | P |
| MmugDNA.23700.1.S1_at | LOC695660 | similar to glutamate receptor 6 | Mmu.14770 | XP_001086511 /// | 71.56487 | A | 175.5264 | P |
| | | isoform 1 precursor | | XP_001086640 /// | | | | |
| | | | | XP_001086762 | | | | |
| Mmu.12414.1.S1_at | LOC695807 | similar to positive cofactor 2, | Mmu.12304 | XP_001084461 | 334.7846 | A | 548.711 | P |
| | | glutamine/Q-rich-associated | | | | | | |
| | | protein isoform b | | | | | | |
| MmugDNA.30964.1.S1_at | LOC695817 | similar to FRG1 protein (FSHD | Mmu.5349 | XP_001084469 | 63.37233 | A | 129.4325 | P |
| | /// | region gene 1 protein) /// similar | | | | | | |
| | LOC721908 | to FRG1 protein (FSHD region | | | | | | |
| | | gene 1 protein) | | | | | | |
| MmugDNA.40736.1.S1_at | LOC695861 | similar to regulatory factor X3 | Mmu.15656 | XP_001086023 /// | 59.62864 | A | 127.9034 | P |
| | | isoform b | | XP_001086140 /// | | | | |
| | | | | XP_001086369 /// | | | | |
| | | | | XP_001086480 /// | | | | |
| | | | | XP_001086606 /// | | | | |
| | | | | XP_001086729 | | | | |
| MmugDNA.17800.1.S1_at | LOC695993 | similar to chromosome 18 open | Mmu.11030 | XP_001084399 /// | 114.231 | A | 191.3399 | P |
| | | reading frame 25 isoform b | | XP_001084520 /// | | | | |
| | | | | XP_001084644 | | | | |
| MmugDNA.25624.1.S1_at | LOC696061 | similar to Wilms tumor 1 isoform B | Mmu.4826 | XP_001084704 | 7.96631 | A | 115.5726 | P |
| MmunewRS.241.1.S1_at | LOC696130 | similar to lin-28 homolog B | Mmu.2034 | XP_001086990 | 38.80841 | A | 120.6038 | P |
| MmugDNA.27370.1.S1_at | LOC696199 | hypothetical protein LOC696199 | Mmu.15122 | XP_001085896 /// | 53.2388 | A | 143.1268 | P |
| | | | | XP_001085999 /// | | | | |
| | | | | XP_001086115 /// | | | | |
| | | | | XP_001086220 | | | | |
| MmuSTS.2262.1.S1_at | LOC696202 | similar to cathepsin E isoform a preproprotein | Mmu.11543 | XP_001089941 /// | 5.594962 | A | 126.9847 | P |
| | | | | XP_001090059 /// | | | | |
| | | | | XP_001090171 /// | | | | |
| | | | | XP_001090284 | | | | |
| MmugDNA.9916.1.S1_at | LOC696275 | similar to neuregulin 1 isoform | Mmu.16225 | XP_001085266 /// | 109.3953 | A | 329.6868 | P |
| | | HRG-beta1 | | XP_001085962 /// | | | | |
| | | | | XP_001086071 /// | | | | |
| | | | | XP_001086184 | | | | |
| MmugDNA.2716.1.S1_at | LOC696683 | similar to origin recognition | Mmu.12240 | XP_001085300 | 18.94276 | A | 94.6161 | P |
| | | complex subunit 5 isoform 1 | | | | | | |
| MmuSTS.2097.1.S1_s_at | LOC696726 | similar to Apolipoprotein C-III | Mmu.3042 | XP_001090312 | 296.7122 | A | 776.4622 | P |
| | | precursor (Apo-CIII) (ApoC-III) | | | | | | |
| MmugDNA.20065.1.S1_at | LOC696749 | similar to runt-related | Mmu.14911 | XP_001086266 /// | 216.7346 | A | 510.84 | P |
| | | transcription factor 1 isoform a | | XP_001086504 /// | | | | |
| | | | | XP_001086631 /// | | | | |
| | | | | XP_001086755 /// | | | | |
| | | | | XP_001086875 /// | | | | |
| | | | | XP_001086981 /// | | | | |
| | | | | XP_001087104 /// | | | | |
| | | | | XP_001087224 /// | | | | |
| | | | | XP_001087338 | | | | |
| MmugDNA.40590.1.S1_at | LOC696991 | similar to CG13322-PA, isoform A | Mmu.15342 | XP_001090213 /// | 151.6879 | A | 116.2028 | P |
| | | | | XP_001090328 /// | | | | |
| | | | | XP_001090443 /// | | | | |
| | | | | XP_001090556 | | | | |
| MmugDNA.23596.1.S1_at | LOC697028 | similar to dedicator of cytokinesis 7 | Mmu.4738 | XP_001085641 | 42.86666 | A | 102.283 | P |
| MmugDNA.19935.1.S1_at | LOC697140 | similar to LIM domain binding 3 | Mmu.11452 | XP_001084921 /// | 127.76 | A | 128.6186 | P |
| | | | | XP_001085158 /// | | | | |
| | | | | XP_001085274 | | | | |
| MmugDNA.19209.1.S1_s_at | LOC697208 | similar to Neutrophil gelatinase-associated lipocalin | Mmu.11352 | XP_001083008 | 87.27077 | A | 281.2362 | P |
| | | precursor (NGAL) (p25) (25 kDa alpha-2- | | | | | | |
| | | microglobulin-related subunit of MMP-9) | | | | | | |
| | | (Lipocalin-2) (Oncogene 24p3) | | | | | | |
| MmugDNA.25784.1.S1_at | LOC697300 | Similar to DNA topoisomerase I | Mmu.12250 | XP_001088021 | 107.8373 | A | 191.1222 | P |
| Mmu.12394.1.S1_at | LOC697308 | similar to CG2453-PA | Mmu.3029 | XP_001089249 | 220.9762 | A | 178.96 | P |
| MmugDNA.33930.1.S1_s_at | LOC697557 | similar to LIN-7 homolog A (LIN- | Mmu.14198 | XP_001087299 | 17.28876 | A | 53.62199 | P |
| | | 7A) (mLin-7) (Mammalian LIN- | | | | | | |
| | | seven protein 1) (MALS-1) | | | | | | |
| | | (Vertebrate LIN 7 homolog 1) | | | | | | |
| | | (Veli-1 protein) | | | | | | |
| MmugDNA.27371.1.S1_at | LOC697751 | hypothetical protein LOC697751 | Mmu.14664 | XP_001086421 /// | 39.36357 | A | 72.29453 | P |
| | | | | XP_001086529 /// | | | | |
| | | | | XP_001086660 /// | | | | |
| | | | | XP_001086783 /// | | | | |
| | | | | XP_001086904 | | | | |
| MmugDNA.41587.1.S1_at | LOC697948 | similar to Apical Junction Molecule family | Mmu.15719 | XP_001094873 /// | 231.1788 | A | 167.211 | P |
| | | member (ajm-1) | | XP_001094990 /// | | | | |
| | | | | XP_001095091 /// | | | | |
| | | | | XP_001095202 /// | | | | |
| | | | | XP_001095318 /// | | | | |
| | | | | XP_001095432 /// | | | | |
| | | | | XP_001095548 | | | | |
| MmugDNA.2651.1.S1_s_at | LOC698116 | hypothetical protein LOC698116 | Mmu.17317 | XP_001089195 | 2.093363 | A | 121.8847 | P |
| MmugDNA.34368.1.S1_at | LOC698257 | hypothetical protein LOC698257 | Mmu.14406 | XP_001091064 | 35.19047 | A | 156.6444 | P |
| MmugDNA.6912.1.S1_at | LOC698488 | similar to glycoprotein M6A | Mmu.309 | XP_001088513 /// | 55.25916 | A | 91.12907 | P |
| | | isoform 1 | | XP_001088626 /// | | | | |
| | | | | XP_001088729 /// | | | | |
| | | | | XP_001088856 /// | | | | |
| | | | | XP_001088960 /// | | | | |
| | | | | XP_001089075 /// | | | | |
| | | | | XP_001089193 /// | | | | |
| | | | | XP_001089301 /// | | | | |
| | | | | XP_001089420 /// | | | | |
| | | | | XP_001089530 /// | | | | |
| | | | | XP_001089652 | | | | |
| MmugDNA.8688.1.S1_s_at | LOC698576 | similar to plakophilin 4 isoform a | Mmu.90 | XP_001090763 /// | 57.58762 | A | 130.691 | P |
| | | | | XP_001091487 /// | | | | |
| | | | | XP_001091595 /// | | | | |
| | | | | XP_001091710 /// | | | | |
| | | | | XP_001091829 | | | | |
| MmugDNA.4919.1.S1_at | LOC698583 | similar to transcobalamin I | Mmu.3193 | XP_001088817 | 6.806493 | A | 121.0638 | P |
| | | precursor | | | | | | |
| MmugDNA.25652.1.S1_at | LOC698610 | similar to netrin-G1 ligand | Mmu.14852 | XP_001090221 /// | 159.8217 | A | 460.219 | P |
| | | | | XP_001090333 /// | | | | |
| | | | | XP_001090447 | | | | |
| MmugDNA.7880.1.S1_at | LOC698922 | similar to transcription | Mmu.1273 | XP_001087401 | 67.81429 | A | 120.6219 | P |
| | | elongation factor B (SIII), | | | | | | |
| | | polypeptide 1 | | | | | | |
| MmugDNA.37713.1.S1_s_at | LOC698993 | similar to RAD1 homolog isoform 1 | Mmu.16416 | XP_001090119 /// | 10.74294 | A | 78.33199 | P |
| | | | | XP_001090232 /// | | | | |
| | | | | XP_001090346 | | | | |
| MmugDNA.26991.1.S1_x_at | LOC699049 | similar to SMT3 suppressor of | Mmu.10807 | XP_001082298 /// | 132.9624 | A | 151.3819 | P |
| | /// | mif two 3 homolog 2 /// similar | | XP_001093875 /// | | | | |
| | LOC705512 | to SMT3 suppressor of mif two 3 | | XP_001101180 | | | | |
| | /// | homolog 2 isoform b precursor | | | | | | |
| | LOC712242 | /// similar to SMT3 suppressor of | | | | | | |
| | /// SUMO2 | mif two 3 homolog 2 /// SMT3 | | | | | | |
| | | suppressor of mif two 3 homolog | | | | | | |
| | | 2 (S. cerevisiae) | | | | | | |
| MmugDNA.30038.1.S1_at | LOC699233 | similar to J domain protein | Mmu.14908 | XP_001091149 /// | 20.38795 | A | 105.1611 | P |
| | | C21orf55 | | XP_001091275 /// | | | | |
| | | | | XP_001091400 | | | | |
| MmugDNA.24540.1.S1_at | LOC699255 | similar to c-Mpl binding protein | Mmu.8566 | XP_001103235 | 97.93331 | A | 108.0194 | P |
| | /// | isoform c /// similar to c-Mpl | | | | | | |
| | LOC713773 | binding protein isoform a | | | | | | |
| MmugDNA.36570.1.S1_at | LOC699320 | similar to keratin 1 | Mmu.15995 | XP_001097706 /// | 82.466 | A | 155.1366 | P |
| | | | | XP_001097800 /// | | | | |
| | | | | XP_001097902 /// | | | | |
| | | | | XP_001097988 /// | | | | |
| | | | | XP_001098082 /// | | | | |
| | | | | XP_001098182 /// | | | | |
| | | | | XP_001098292 | | | | |
| MmugDNA.36148.1.S1_at | LOC699519 | similar to cytochrome P450, | Mmu.16164 | XP_001091192 /// | 6.762844 | A | 128.3562 | P |
| | | family 26, subfamily A, | | XP_001091311 /// | | | | |
| | | polypeptide 1 isoform 2 | | XP_001091435 | | | | |
| MmugDNA.34762.1.S1_at | LOC699606 | similar to YKT6 v-SNARE protein | Mmu.14457 | XP_001092458 /// | 352.2617 | A | 455.7151 | P |
| | | | | XP_001092567 | | | | |
| MmugDNA.5021.1.S1_at | LOC699884 | similar to aspartate beta- | Mmu.12462 | XP_001090473 /// | 74.45432 | A | 142.7363 | P |
| | | hydroxylase isoform b | | XP_001090590 /// | | | | |
| | | | | XP_001090710 /// | | | | |
| | | | | XP_001090824 | | | | |
| MmugDNA.35909.1.S1_at | LOC700246 | hypothetical protein LOC700246 | Mmu.16339 | XP_001091537 /// | 141.387 | A | 153.2613 | P |
| | | | | XP_001091653 /// | | | | |
| | | | | XP_001091770 | | | | |
| MmugDNA.2916.1.S1_at | LOC700561 | similar to Protein FAM61B | Mmu.4706 | XP_001090063 | 64.34468 | A | 237.9115 | P |
| MmugDNA.2141.1.S1_at | LOC700632 | similar to tumor protein p53 inducible nuclear | Mmu.12749 | XP_001090474 /// | 103.4481 | A | 245.4697 | P |
| | | protein 1 | | XP_001090592 | | | | |
| MmugDNA.6969.1.S1_s_at | LOC700634 | similar to PTK2 protein tyrosine | Mmu.3254 | XP_001091188 /// | 318.6551 | A | 503.8765 | P |
| | | kinase 2 isoform a | | XP_001092257 /// | | | | |
| | | | | XP_001092479 /// | | | | |
| | | | | XP_001092599 /// | | | | |
| | | | | XP_001092714 /// | | | | |
| | | | | XP_001092835 /// | | | | |
| | | | | XP_001092947 /// | | | | |
| | | | | XP_001093060 /// | | | | |
| | | | | XP_001093166 /// | | | | |
| | | | | XP_001093282 | | | | |
| MmugDNA.11282.1.S1_at | LOC700766 | similar to CG14299-PA, isoform A | Mmu.13220 | XP_001089105 | 102.762 | A | 180.8994 | P |
| MmugDNA.1940.1.S1_at | LOC700803 | LOC57821 | Mmu.10545 | XP_001093899 /// | 42.41242 | A | 65.8287 | P |
| | | | | XP_001094005 /// | | | | |
| | | | | XP_001094116 | | | | |
| MmugDNA.22818.1.S1_at | LOC700803 | LOC57821 | Mmu.10545 | XP_001093899 /// | 99.11937 | A | 161.2611 | P |
| | | | | XP_001094005 /// | | | | |
| | | | | XP_001094116 | | | | |
| MmugDNA.33647.1.S1_s_at | LOC700961 | similar to zinc finger protein 79 | Mmu.15647 | XP_001095865 | 124.1566 | A | 166.1214 | P |
| | | (pT7) | | | | | | |
| MmugDNA.43384.1.S1_at | LOC700988 | similar to androgen-induced 1 | Mmu.4494 | XP_001091992 /// | 50.12266 | A | 91.1585 | P |
| | | | | XP_001092111 /// | | | | |
| | | | | XP_001092349 /// | | | | |
| | | | | XP_001092577 | | | | |
| MmugDNA.13490.1.S1_at | LOC701093 | similar to calcitonin receptor | Mmu.14864 | XP_001099231 /// | 70.82004 | A | 141.6998 | P |
| | | | | XP_001099337 /// | | | | |
| | | | | XP_001099435 /// | | | | |
| | | | | XP_001099544 | | | | |
| MmuSTS.1092.1.S1_at | LOC701162 | similar to solute carrier family 6, | Mmu.11269 | XP_001099500 | 62.05202 | A | 183.6655 | P |
| | | member 17 | | | | | | |
| MmugDNA.10860.1.S1_s_at | LOC701186 | similar to serine hydroxymethyltransferase | Mmu.12203 | XP_001096193 /// | 299.3282 | A | 568.1307 | P |
| | | 1 (soluble) isoform 1 | | XP_001096314 /// | | | | |
| | | | | XP_001096436 /// | | | | |
| | | | | XP_001096547 /// | | | | |
| | | | | XP_001096653 /// | | | | |
| | | | | XP_001096755 /// | | | | |
| | | | | XP_001096871 /// | | | | |
| | | | | XP_001096982 | | | | |
| MmugDNA.9882.1.S1_at | LOC701376 | similar to NADPH oxidase 1 isoform long | Mmu.15254 | XP_001089791 /// | 59.80977 | A | 157.23 | P |
| | | variant | | XP_001089905 /// | | | | |
| | | | | XP_001090025 /// | | | | |
| | | | | XP_001090252 /// | | | | |
| | | | | XP_001090373 | | | | |
| MmugDNA.24847.1.S1_at | LOC701547 | similar to glycine-N-acyltransferase-like 1 | Mmu.14222 | XP_001092072 /// | 104.8917 | A | 213.7509 | P |
| | | | | XP_001092197 /// | | | | |
| | | | | XP_001092316 /// | | | | |
| | | | | XP_001092427 | | | | |
| Mmu.11429.1.A1_at | LOC701690 | Similar to T-cell activation Rho | Mmu.12230 | XP_001095239 /// | 125.3303 | A | 137.3554 | P |
| | | GTPase-activating protein isoform b | | XP_001095349 /// | | | | |
| | | | | XP_001095467 /// | | | | |
| | | | | XP_001095579 /// | | | | |
| | | | | XP_001095675 /// | | | | |
| | | | | XP_001095775 | | | | |
| MmugDNA.37160.1.S1_at | LOC701721 | Similar to X Kell blood group | Mmu.13648 | XP_001090721 | 93.54068 | A | 282.5066 | P |
| | | precursor-related, X-linked | | | | | | |
| MmugDNA.14409.1.S1_at | LOC701722 | similar to nucleoporin 62 | Mmu.12987 | XP_001094695 | 17.99913 | A | 83.21231 | P |
| Mmu.2615.1.S1_at | LOC702282 | similar to ADP-ribosylation factor 7 | Mmu.3100 | XP_001096998 | 45.92997 | A | 137.102 | P |
| MmugDNA.12356.1.S1_at | LOC702392 | similar to peroxin1 | Mmu.13262 | XP_001100851 /// | 267.6477 | A | 272.199 | P |
| | | | | XP_001101055 | | | | |
| MmugDNA.35938.1.S1_at | LOC702474 | similar to F46E10.1a /// similar | Mmu.11756 | XP_001093983 /// | 212.2583 | A | 374.0013 | P |
| | /// | to radical S-adenosyl methionine | | XP_001097818 | | | | |
| | LOC705626 | domain containing 1 | | | | | | |
| MmugDNA.22044.1.S1_at | LOC702523 | similar to plexin domain | Mmu.13851 | XP_001094684 /// | 56.80964 | A | 144.3693 | P |
| | | containing 2 precursor | | XP_001094803 | | | | |
| MmugDNA.30120.1.S1_at | LOC702596 | similar to nucleolar RNA- | Mmu.15669 | XP_001099108 /// | 517.206 | A | 624.0098 | P |
| | | associated protein alpha isoform | | XP_001099208 | | | | |
| MmugDNA.14645.1.S1_at | LOC702627 | similar to CNKSR family member 3 | Mmu.16800 | XP_001095122 | 112.3272 | A | 171.7359 | P |
| MmuSTS.4277.1.S1_at | LOC702809 | similar to eukaryotic translation | Mmu.7828 | XP_001096741 /// | 46.99945 | A | 91.84947 | P |
| | /// | elongation factor 1 alpha 2 /// | | XP_001107881 /// | | | | |
| | LOC703715 | similar to eukaryotic translation | | XP_001107938 /// | | | | |
| | /// | elongation factor 1 alpha 2 /// | | XP_001107997 /// | | | | |
| | LOC704199 | similar to eukaryotic translation | | XP_001108047 | | | | |
| | /// | elongation factor 1 alpha 2 /// | | | | | | |
| | LOC704438 | similar to eukaryotic translation | | | | | | |
| | /// | elongation factor 1 alpha 1 /// | | | | | | |
| | LOC709017 | similar to eukaryotic translation | | | | | | |
| | /// | elongation factor 1 alpha 1 /// | | | | | | |
| | LOC715351 | similar to eukaryotic translation | | | | | | |
| | | elongation factor 1 alpha 1 | | | | | | |
| Mmu.14402.2.A1_at | LOC702904 | Similar to T-cell receptor beta | Mmu.3323 | XP_001091216 | 43.79837 | A | 185.5729 | P |
| | | chain C region | | | | | | |
| MmugDNA.35794.1.S1_at | LOC703305 | similar to adrenomedullin | Mmu.1495 | XP_001100373 /// | 84.27942 | A | 185.7086 | P |
| | | | | XP_001100748 /// | | | | |
| | | | | XP_001100827 | | | | |
| MmugDNA.18234.1.S1_s_at | LOC703331 | similar to runt-related transcription factor | Mmu.14787 | XP_001100592 /// | 58.99397 | A | 193.9611 | P |
| | | 2 isoform b | | XP_001100682 /// | | | | |
| | | | | XP_001100772 /// | | | | |
| | | | | XP_001100855 /// | | | | |
| | | | | XP_001100961 /// | | | | |
| | | | | XP_001101058 | | | | |
| MmugDNA.42623.1.S1_at | LOC703350 | Similar to SLD5 | Mmu.12445 | XP_001094432 | 116.1626 | A | 230.3927 | P |
| MmugDNA.37293.1.S1_at | LOC703448 | similar to NHS-like 1 | Mmu.12755 | XP_001094901 /// | 38.42938 | A | 120.9677 | P |
| | | | | XP_001095017 /// | | | | |
| | | | | XP_001095123 | | | | |
| MmugDNA.28192.1.S1_at | LOC703449 | similar to solute carrier family 22 | Mmu.14760 | XP_001098823 /// | 85.29906 | A | 109.4904 | P |
| | | member 1 isoform a | | XP_001098927 /// | | | | |
| | | | | XP_001099030 | | | | |
| Mmu.9793.1.S1_at | LOC703475 | similar to chloride intracellular | Mmu.13655 | XP_001098953 /// | 113.1555 | A | 216.6789 | P |
| | | channel 2 | | XP_001099055 /// | | | | |
| | | | | XP_001099159 | | | | |
| MmugDNA.14145.1.S1_s_at | LOC703676 | similar to clusterin associated | Mmu.12076 | XP_001095007 | 9.514027 | A | 72.95879 | P |
| | | protein 1 isoform 1 | | | | | | |
| MmugDNA.32118.1.S1_at | LOC703699 | similar to N-acylsphingosine amidohydrolase | Mmu.1534 | XP_001098236 /// | 49.51334 | A | 133.2948 | P |
| | | (acid ceramidase) 1 preproprotein isoform a | | XP_001098342 | | | | |
| MmugDNA.5848.1.S1_at | LOC703707 | similar to type IV alpha 6 | Mmu.14512 | XP_001098247 /// | 118.7948 | A | 173.2802 | P |
| | | collagen isoform A precursor | | XP_001098348 /// | | | | |
| | | | | XP_001098448 | | | | |
| MmugDNA.6896.1.S1_at | LOC703747 | hypothetical protein LOC703747 | Mmu.11245 | XP_001097797 /// | 99.1186 | A | 166.5303 | P |
| | | | | XP_001097899 /// | | | | |
| | | | | XP_001097986 /// | | | | |
| | | | | XP_001098078 /// | | | | |
| | | | | XP_001098178 /// | | | | |
| | | | | XP_001098384 | | | | |
| MmugDNA.18415.1.S1_at | LOC703912 | similar to zinc-finger protein | Mmu.16177 | XP_001095490 /// | 66.7701 | A | 171.3356 | P |
| | | NOLZ1 | | XP_001095599 /// | | | | |
| | | | | XP_001095696 /// | | | | |
| | | | | XP_001095797 | | | | |
| MmugDNA.20879.1.S1_at | LOC703981 | similar to NOD9 protein isoform 1 | Mmu.15714 | XP_001104018 /// | 68.5675 | A | 247.2942 | P |
| | | | | XP_001104187 /// | | | | |
| | | | | XP_001104271 /// | | | | |
| | | | | XP_001104348 /// | | | | |
| | | | | XP_001104430 | | | | |
| MmugDNA.43058.1.S1_at | LOC704126 | similar to kinesin family member | Mmu.14823 | XP_001096456 /// | 240.8623 | A | 391.0729 | P |
| | | 13A | | XP_001096670 /// | | | | |
| | | | | XP_001096780 /// | | | | |
| | | | | XP_001096896 | | | | |
| MmugDNA.9461.1.S1_at | LOC704129 | similar to M-phase | Mmu.872 | XP_001097629 /// | 9.741516 | A | 150.9924 | P |
| | /// | phosphoprotein 6 /// similar to | | XP_001111939 | | | | |
| | LOC714335 | M-phase phosphoprotein 6 | | | | | | |
| MmugDNA.36952.1.S1_at | LOC704226 | similar to | Mmu.1901 | XP_001095099 /// | 181.1201 | A | 255.0666 | P |
| | | metallophosphoesterase 1 | | XP_001095213 /// | | | | |
| | | precursor | | XP_001095328 /// | | | | |
| | | | | XP_001095440 /// | | | | |
| | | | | XP_001095557 /// | | | | |
| | | | | XP_001095654 | | | | |
| MmugDNA.20355.1.S1_at | LOC704563 | hypothetical protein LOC704563 | Mmu.14834 | XP_001087946 /// | 43.39126 | A | 163.4751 | P |
| | | | | XP_001088073 /// | | | | |
| | | | | XP_001088182 /// | | | | |
| | | | | XP_001088296 /// | | | | |
| | | | | XP_001088391 | | | | |
| MmugDNA.32338.1.S1_at | LOC704620 | Hypothetical protein LOC704620 | Mmu.12860 | XP_001092983 | 484.9445 | A | 1003.579 | P |
| MmugDNA.26222.1.S1_at | LOC704779 | hypothetical protein LOC704779 | Mmu.1356 | XP_001088505 /// | 145.6491 | A | 229.6519 | P |
| | | | | XP_001088616 /// | | | | |
| | | | | XP_001088722 /// | | | | |
| | | | | XP_001088845 | | | | |
| MmugDNA.32288.1.S1_at | LOC705099 | similar to IBR domain containing 2 | Mmu.13564 | XP_001097834 | 169.2173 | A | 287.2967 | P |
| MmuSTS.753.1.S1_at | LOC705192 | similar to solute carrier family 34 | Mmu.4 | XP_001087672 /// | 399.9195 | A | 614.1758 | P |
| | | (sodium phosphate), member 3 | | XP_001087793 | | | | |
| MmugDNA.13807.1.S1_at | LOC705221 | similar to CD2-associated protein | Mmu.14706 | XP_001103871 | 101.1595 | A | 165.9324 | P |
| MmugDNA.32676.1.S1_at | LOC705267 | similar to mitochondrial ribosomal protein S5 | Mmu.4582 | XP_001093640 | 81.411 | A | 106.6216 | P |
| MmugDNA.39707.1.S1_at | LOC705275 | similar to 5-azacytidine induced 2 | Mmu.2888 | XP_001093647 | 228.3279 | A | 445.0563 | P |
| MmugDNA.3813.1.S1_at | LOC705358 | similar to PDZ and LIM domain 5 | Mmu.11535 | XP_001102789 /// | 196.3453 | A | 217.9732 | P |
| | | isoform a | | XP_001103137 /// | | | | |
| | | | | XP_001103292 /// | | | | |
| | | | | XP_001103360 /// | | | | |
| | | | | XP_001103447 | | | | |
| MmugDNA.41256.1.S1_at | LOC705369 | similar to SET domain containing 3 | Mmu.12527 | XP_001103146 /// | 307.612 | A | 442.7356 | P |
| | | | | XP_001103224 /// | | | | |
| | | | | XP_001103370 | | | | |
| MmugDNA.28135.1.S1_at | LOC705773 | similar to wingless-type MMTV | Mmu.15115 | XP_001107735 /// | 53.23829 | A | 147.2127 | P |
| | | integration site family, member | | XP_001107795 /// | | | | |
| | | 2B isoform WNT-2B2 | | XP_001107861 | | | | |
| MmugDNA.32069.1.S1_at | LOC705781 | similar to CG10721-PA | Mmu.11312 | XP_001098386 | 139.6408 | A | 181.3665 | P |
| MmugDNA.7008.1.S1_at | LOC705781 | similar to CG10721-PA | Mmu.11312 | XP_001098386 | 257.4816 | A | 205.8675 | P |
| MmugDNA.20418.1.S1_at | LOC705794 | similar to Glutamate receptor 4 | Mmu.15725 | XP_001100749 /// | 49.4125 | A | 144.5466 | P |
| | | precursor (GluR-4) (GluR4) | | XP_001100828 /// | | | | |
| | | (GluR-D) (Glutamate receptor | | XP_001100934 /// | | | | |
| | | ionotropic, AMPA 4) (AMPA- | | XP_001101031 /// | | | | |
| | | selective glutamate receptor 4) | | XP_001101120 /// | | | | |
| | | | | XP_001101205 /// | | | | |
| | | | | XP_001101297 /// | | | | |
| | | | | XP_001101389 | | | | |
| MmugDNA.11389.1.S1_at | LOC705913 | similar to cytidine deaminase | Mmu.14713 | XP_001096632 | 157.2027 | A | 432.5854 | P |
| Mmu.8604.1.A1_at | LOC706093 | Similar to golgi-associated microtubule-binding | Mmu.12976 | XP_001099454 /// | 105.2247 | A | 270.9851 | P |
| | | protein HOOK3 | | XP_001099564 | | | | |
| MmugDNA.31582.1.S1_at | LOC706263 | similar to potassium voltage- | Mmu.15899 | XP_001108426 | 64.51572 | A | 142.2389 | P |
| | | gated channel, Isk-related family, member 4 | | | | | | |
| MmugDNA.6257.1.S1_at | LOC706392 | similar to Temporarily Assigned | Mmu.15492 | XP_001100027 /// | 28.65171 | A | 216.6125 | P |
| | | Gene name family member (tag- | | XP_001100112 /// | | | | |
| | | 241) | | XP_001100204 | | | | |
| MmugDNA.2951.1.S1_at | LOC706404 | similar to anillin, actin binding | Mmu.12004 | XP_001103129 /// | 41.87038 | A | 150.5943 | P |
| | | protein (scraps homolog, | | XP_001103356 /// | | | | |
| | | Drosophila) | | XP_001103440 | | | | |
| MmugDNA.16996.1.S1_at | LOC706417 | similar to rap2 interacting | Mmu.3060 | XP_001105219 /// | 77.67221 | A | 127.3368 | P |
| | | protein x isoform 2 | | XP_001105432 /// | | | | |
| | | | | XP_001105503 /// | | | | |
| | | | | XP_001105576 | | | | |
| MmugDNA.2760.1.S1_at | LOC706531 | similar to SRY (sex determining | Mmu.2172 | XP_001098923 | 494.1494 | A | 320.2222 | P |
| | | region Y)-box 4 | | | | | | |
| MmugDNA.41505.1.S1_at | LOC706541 | similar to PDZ domain-containing | Mmu.12847 | XP_001100504 /// | 60.10989 | A | 85.12571 | P |
| | | guanine nucleotide exchange | | XP_001100780 /// | | | | |
| | | factor I | | XP_001100863 /// | | | | |
| | | | | XP_001100970 /// | | | | |
| | | | | XP_001101236 /// | | | | |
| | | | | XP_001101336 /// | | | | |
| | | | | XP_001101427 /// | | | | |
| | | | | XP_001101518 | | | | |
| MmugDNA.4165.1.S1_at | LOC707050 | similar to caldesmon 1 isoform 4 | Mmu.1286 | XP_001103048 /// | 134.2276 | A | 113.0357 | P |
| | | | | XP_001103209 /// | | | | |
| | | | | XP_001103288 /// | | | | |
| | | | | XP_001103525 /// | | | | |
| | | | | XP_001103606 /// | | | | |
| | | | | XP_001103692 /// | | | | |
| | | | | XP_001103781 /// | | | | |
| | | | | XP_001103868 /// | | | | |
| | | | | XP_001103951 /// | | | | |
| | | | | XP_001104042 /// | | | | |
| | | | | XP_001104129 /// | | | | |
| | | | | XP_001104210 /// | | | | |
| | | | | XP_001104289 /// | | | | |
| | | | | XP_001104371 | | | | |
| MmugDNA.24929.1.S1_at | LOC707355 | similar to zinc finger protein 672 | Mmu.15300 | XP_001105495 /// | 160.5896 | A | 148.2761 | P |
| | | | | XP_001105637 /// | | | | |
| | | | | XP_001105777 | | | | |
| MmugDNA.21203.1.S1_x_at | LOC707383 | similar to amyloid beta (A4) precursor | Mmu.669 | XP_001101993 | 428.4578 | A | 499.8212 | P |
| | | protein-binding, family B, member 1 interacting protein | | | | | | |
| MmugDNA.35674.1.S1_at | LOC707661 | similar to additional sex combs | Mmu.15484 | XP_001101400 /// | 110.2575 | A | 154.3551 | P |
| | | like 1 | | XP_001101495 /// | | | | |
| | | | | XP_001101584 /// | | | | |
| | | | | XP_001101677 | | | | |
| MmugDNA.14411.1.S1_at | LOC707686 | similar to angiogenic factor | Mmu.12022 | XP_001106588 /// | 312.2592 | A | 474.9281 | P |
| | | VG5Q | | XP_001106645 /// | | | | |
| | | | | XP_001106704 /// | | | | |
| | | | | XP_001106767 | | | | |
| MmuSTS.1472.1.S1_at | LOC707739 | Similar to serine/threonine | Mmu.12485 | XP_001096161 | 31.29481 | A | 81.42928 | P |
| | | protein kinase MASK | | | | | | |
| MmugDNA.6011.1.S1_at | LOC707982 | similar to rhomboid domain | Mmu.15898 | XP_001110015 /// | 253.2026 | A | 423.9781 | P |
| | /// | containing 1 /// hypothetical | | XP_001110070 /// | | | | |
| | LOC708189 | protein LOC708189 | | XP_001110119 /// | | | | |
| | | | | XP_001110165 /// | | | | |
| | | | | XP_001110210 | | | | |
| MmugDNA.37057.1.S1_at | LOC708094 | similar to mannosyl (alpha-1,3-)- | Mmu.15839 | XP_001102758 /// | 104.4101 | A | 147.5036 | P |
| | | glycoprotein beta-1,4-N- | | XP_001102852 | | | | |
| | | acetylglucosaminyltransferase, isoenzyme A | | | | | | |
| MmugDNA.42069.1.S1_s_at | LOC708427 | similar to organic solute | Mmu.11865 | XP_001108335 | 78.81197 | A | 116.7262 | P |
| | | transporter beta | | | | | | |
| MmugDNA.30697.1.S1_at | LOC708649 | similar to leucine rich repeat | Mmu.13704 | XP_001101795 /// | 163.4347 | A | 221.4591 | P |
| | | containing 28 | | XP_001101886 /// | | | | |
| | | | | XP_001101987 /// | | | | |
| | | | | XP_001102074 | | | | |
| MmuSTS.1715.1.S1_at | LOC708906 | similar to wingless-type MMTV | Mmu.14255 | XP_001104947 /// | 130.317 | A | 218.3881 | P |
| | | integration site family, member | | XP_001105026 /// | | | | |
| | | 10B precursor | | XP_001105115 | | | | |
| MmuSTS.4837.1.S1_at | LOC708940 | similar to Guanine nucleotide-binding protein | Mmu.14862 | XP_001108555 /// | 67.89697 | A | 63.73149 | P |
| | | G(i), alpha-1 subunit (Adenylate | | XP_001108609 /// | | | | |
| | | cyclase-inhibiting G alpha protein) | | XP_001108656 | | | | |
| MmuSTS.508.1.S1_at | LOC709049 | similar to activating signal | Mmu.14734 | XP_001105587 /// | 145.0563 | A | 167.4562 | P |
| | | cointegrator 1 complex subunit 1 | | XP_001105655 /// | | | | |
| | | | | XP_001105727 /// | | | | |
| | | | | XP_001105789 /// | | | | |
| | | | | XP_001105856 /// | | | | |
| | | | | XP_001105929 /// | | | | |
| | | | | XP_001106003 | | | | |
| MmugDNA.31920.1.S1_at | LOC709087 | similar to EF-hand domain (C-terminal) | Mmu.14530 | XP_001097580 | 36.69831 | A | 95.83981 | P |
| | | containing 2 | | | | | | |
| MmugDNA.32637.1.S1_at | LOC709253 | similar to nucleosomal binding protein 1 | Mmu.13802 | XP_001103630 | 80.94846 | A | 106.7455 | P |
| MmugDNA.42508.1.S1_at | LOC709303 | similar to ATP binding protein associated | Mmu.1839 | XP_001104184 /// | 60.61469 | A | 122.8885 | P |
| | | with cell differentiation | | XP_001104266 | | | | |
| MmugDNA.38015.1.S1_at | LOC709468 | similar to terminal | Mmu.12395 | XP_001107131 | 75.45173 | A | 118.2112 | P |
| | | deoxynucleotidyltransferase interacting factor 1 | | | | | | |
| Mmu.10346.1.S1_at | LOC709544 | hypothetical protein LOC709544 | Mmu.16556 | XP_001096738 | 507.0977 | A | 619.4869 | P |
| Mmu.6678.1.S1_x_at | LOC709619 | similar to Metallothionein-1I | Mmu.11575 | XP_001098159 | 1740.248 | A | 2628.085 | P |
| | | (MT-1I) (Metallothionein-II) | | | | | | |
| MmugDNA.8461.1.S1_at | LOC709735 | similar to nuclear receptor | Mmu.15049 | XP_001110159 /// | 42.78323 | A | 100.8168 | P |
| | | subfamily 5, group A, member 2 | | XP_001110202 /// | | | | |
| | | isoform 2 | | XP_001110281 | | | | |
| MmugDNA.39938.1.S1_at | LOC709882 | similar to Troponin T, cardiac | Mmu.14101 | XP_001098451 | 129.6782 | A | 230.9345 | P |
| | | muscle (TnTc) (Cardiac muscle | | | | | | |
| | | troponin T) (cTnT) | | | | | | |
| MmugDNA.1217.1.S1_at | LOC709920 | similar to Helix-loop-helix protein | Mmu.15111 | XP_001112029 /// | 8.452376 | A | 99.66127 | P |
| | | 2 (HEN2) (Nescient helix loop | | XP_001112063 /// | | | | |
| | | helix 2) (NSCL-2) | | XP_001112098 | | | | |
| MmugDNA.19461.1.S1_at | LOC710132 | similar to p53 target zinc finger | Mmu.13485 | XP_001109218 | 348.8743 | A | 339.8408 | P |
| | | protein isoform 1 | | | | | | |
| MmugDNA.33092.1.S1_s_at | LOC710136 | similar to alpha-2-glycoprotein 1, | Mmu.2996 | XP_001098813 | 12.33912 | A | 216.8815 | P |
| | | zinc | | | | | | |
| MmugDNA.41451.1.S1_at | LOC710209 | similar to F33H2.6 | Mmu.12671 | XP_001108744 /// | 21.07946 | A | 115.8894 | P |
| | | | | XP_001108792 /// | | | | |
| | | | | XP_001108841 /// | | | | |
| | | | | XP_001108885 /// | | | | |
| | | | | XP_001108926 /// | | | | |
| | | | | XP_001108981 /// | | | | |
| | | | | XP_001109038 /// | | | | |
| | | | | XP_001109094 /// | | | | |
| | | | | XP_001109206 | | | | |
| MmugDNA.25032.1.S1_at | LOC710300 | similar to CDC14 homolog B | Mmu.15640 | XP_001106305 /// | 96.10104 | A | 163.648 | P |
| | | isoform 1 | | XP_001106374 /// | | | | |
| | | | | XP_001106436 | | | | |
| MmugDNA.26478.1.S1_at | LOC710518 | similar to mitochondrial solute | Mmu.11000 | XP_001105927 /// | 455.317 | A | 775.371 | P |
| | | carrier-like protein | | XP_001106001 /// | | | | |
| | | | | XP_001106076 /// | | | | |
| | | | | XP_001106141 /// | | | | |
| | | | | XP_001106211 | | | | |
| MmugDNA.17545.1.S1_at | LOC710681 | hypothetical protein LOC710681 | Mmu.16264 | XP_001106907 /// | 117.03 | A | 219.1418 | P |
| | | | | XP_001106971 /// | | | | |
| | | | | XP_001107040 | | | | |
| MmugDNA.28666.1.S1_at | LOC710731 | similar to palmdelphin | Mmu.12773 | XP_001105606 /// | 37.84584 | A | 84.9398 | P |
| | | | | XP_001105677 /// | | | | |
| | | | | XP_001105748 /// | | | | |
| | | | | XP_001105804 /// | | | | |
| | | | | XP_001105954 | | | | |
| MmugDNA.8258.1.S1_at | LOC710987 | similar to mucolipin 3 | Mmu.15135 | XP_001108095 /// | 29.74118 | A | 102.5425 | P |
| | | | | XP_001108302 /// | | | | |
| | | | | XP_001108412 | | | | |
| MmugDNA.34412.1.S1_at | LOC711115 | similar to mitogen-activated | Mmu.3822 | XP_001108716 /// | 22.68439 | A | 99.87075 | P |
| | | protein kinase 8 isoform 1 | | XP_001108770 /// | | | | |
| | | | | XP_001108815 /// | | | | |
| | | | | XP_001108865 | | | | |
| Mmu.5150.1.A1_at | LOC711124 | Similar to NCK-associated | Mmu.2403 | XP_001099879 | 88.93265 | A | 141.7522 | P |
| | | protein 1 isoform 2 | | | | | | |
| Mmu.5996.2.S1_x_at | LOC711141 | hypothetical protein LOC711141 | Mmu.10434 | XP_001099892 | 92.06384 | A | 109.7883 | P |
| MmugDNA.17269.1.S1_at | LOC711164 | similar to sulfite oxidase | Mmu.15990 | XP_001113374 /// | 171.6959 | A | 271.7326 | P |
| | | | | XP_001113406 /// | | | | |
| | | | | XP_001113430 /// | | | | |
| | | | | XP_001113456 | | | | |
| MmugDNA.4283.1.S1_at | LOC711279 | similar to leucine zipper, putative | Mmu.16155 | XP_001109524 /// | 156.9818 | A | 163.6825 | P |
| | | tumor suppressor 2 | | XP_001109574 /// | | | | |
| | | | | XP_001109628 /// | | | | |
| | | | | XP_001109674 /// | | | | |
| | | | | XP_001109715 /// | | | | |
| | | | | XP_001109770 /// | | | | |
| | | | | XP_001109817 | | | | |
| MmugDNA.33876.1.S1_s_at | LOC711336 | similar to olfactomedin 2 | Mmu.15445 | XP_001099531 /// | 105.1338 | A | 182.7413 | P |
| | | | | XP_001099628 /// | | | | |
| | | | | XP_001099726 /// | | | | |
| | | | | XP_001099831 | | | | |
| MmugDNA.17217.1.S1_at | LOC711485 | similar to acyl-Coenzyme A | Mmu.12959 | XP_001109931 | 123.1174 | A | 293.2802 | P |
| | | dehydrogenase, long chain precursor | | | | | | |
| MmugDNA.15166.1.S1_at | LOC711633 | similar to zinc finger CCCH-type | Mmu.15988 | XP_001114089 /// | 185.2786 | A | 239.9244 | P |
| | | containing 10 | | XP_001114107 /// | | | | |
| | | | | XP_001114132 /// | | | | |
| | | | | XP_001114150 | | | | |
| MmuSTS.4200.1.S1_at | LOC711691 | Similar to pre-B-cell leukemia | Mmu.4832 | XP_001100529 | 105.6631 | A | 780.6314 | P |
| | | transcription factor 3 | | | | | | |
| Mmu.13564.1.S1_at | LOC711742 | similar to kinesin family member | Mmu.564 | XP_001113416 /// | 8.346619 | A | 230.6845 | P |
| | | 9 isoform 2 | | XP_001113441 | | | | |
| MmugDNA.22716.1.S1_at | LOC711901 | similar to TBC1 domain family, | Mmu.11462 | XP_001109803 /// | 130.5118 | A | 170.4844 | P |
| | | member 16 | | XP_001109846 /// | | | | |
| | | | | XP_001109890 | | | | |
| MmugDNA.43479.1.S1_at | LOC711908 | similar to transmembrane 4 | Mmu.2535 | XP_001108758 /// | 8.667226 | A | 84.54928 | P |
| | | superfamily member 1 | | XP_001108803 | | | | |
| MmugDNA.30723.1.S1_at | LOC711984 | Similar to zinc finger CCCH-type | Mmu.12594 | XP_001106124 /// | 175.1743 | A | 424.0466 | P |
| | | domain containing 7 | | XP_001106316 /// | | | | |
| | | | | XP_001106384 /// | | | | |
| | | | | XP_001106446 | | | | |
| MmugDNA.20892.1.S1_at | LOC712033 | similar to PCTAIRE protein kinase 1 | Mmu.14735 | XP_001100911 | 120.9395 | A | 256.8878 | P |
| MmugDNA.15919.1.S1_at | LOC712047 | similar to V-set and | Mmu.11490 | XP_001109973 /// | 73.78225 | A | 138.8611 | P |
| | | immunoglobulin domain containing 2 | | XP_001110168 | | | | |
| MmugDNA.10446.1.S1_at | LOC712115 | similar to ADP-ribosylation factor guanine | Mmu.14062 | XP_001101005 | 75.08247 | A | 115.4225 | P |
| | | nucleotide factor 6 isoform a | | | | | | |
| MmugDNA.11597.1.S1_at | LOC712144 | similar to zinc finger protein 42 | Mmu.15367 | XP_001099728 /// | 138.5558 | A | 151.442 | P |
| | | isoform 2 | | XP_001099833 | | | | |
| MmugDNA.12728.1.S1_at | LOC712272 | similar to fibronectin type 3 and | Mmu.13034 | XP_001109699 | 37.6952 | A | 102.4023 | P |
| | | SPRY domain-containing protein | | | | | | |
| MmuSTS.849.1.S1_at | LOC712288 | similar to thrombospondin, type | Mmu.11407 | XP_001106832 /// | 58.88806 | A | 99.43536 | P |
| | | I, domain containing 2 | | XP_001106900 | | | | |
| MmugDNA.26929.1.S1_s_at | LOC712486 | similar to ficolin 2 isoform a | Mmu.11973 | XP_001098197 /// | 37.70898 | A | 184.9997 | P |
| | | precursor | | XP_001098304 | | | | |
| MmugDNA.1324.1.S1_s_at | LOC712600 | similar to quaking homolog, KH domain RNA | Mmu.2689 | XP_001101642 | 109.0662 | A | 139.7951 | P |
| | | binding isoform HQK-5 | | | | | | |
| MmugDNA.22601.1.S1_at | LOC713029 | hypothetical protein LOC713029 | Mmu.14564 | XP_001110409 | 11.16738 | A | 138.9437 | P |
| MmugDNA.12133.1.S1_at | LOC713035 | similar to BCL2-like 1 isoform 1 | Mmu.16103 | XP_001109879 /// | 159.8234 | A | 150.4057 | P |
| | | | | XP_001109926 /// | | | | |
| | | | | XP_001109964 /// | | | | |
| | | | | XP_001110009 /// | | | | |
| | | | | XP_001110062 /// | | | | |
| | | | | XP_001110113 /// | | | | |
| | | | | XP_001110162 /// | | | | |
| | | | | XP_001110205 /// | | | | |
| | | | | XP_001110245 /// | | | | |
| | | | | XP_001110285 /// | | | | |
| | | | | XP_001110326 | | | | |
| MmugDNA.158.1.S1_at | LOC713216 | similar to minor | Mmu.719 | XP_001110535 /// | 235.1732 | A | 562.5519 | P |
| | | histocompatibility antigen 13 | | XP_001110638 /// | | | | |
| | | isoform 3 | | XP_001110677 | | | | |
| MmugDNA.21170.1.S1_at | LOC713289 | similar to sarcosine | Mmu.14226 | XP_001099822 /// | 50.93322 | A | 157.4154 | P |
| | | dehydrogenase | | XP_001100018 /// | | | | |
| | | | | XP_001100105 | | | | |
| MmugDNA.17300.1.S1_s_at | LOC713324 | similar to erythrocyte membrane protein band | Mmu.14133 | XP_001102639 | 68.31221 | A | 90.16785 | P |
| | | 4.1 like 4B isoform 2 | | | | | | |
| MmuSTS.2766.1.S1_at | LOC713353 | Similar to unactive progesterone | Mmu.4022 | XP_001115328 /// | 77.942 | A | 233.5481 | P |
| | | receptor, 23 kD | | XP_001115356 /// | | | | |
| | | | | XP_001115374 /// | | | | |
| | | | | XP_001115388 | | | | |
| MmugDNA.2816.1.S1_s_at | LOC713680 | similar to Protein C9orf7 | Mmu.11422 | XP_001100751 /// | 178.9342 | A | 450.418 | P |
| | | | | XP_001100830 | | | | |
| MmugDNA.32391.1.S1_at | LOC713786 | similar to hepatocellular carcinoma- | Mmu.14691 | XP_001103245 | 155.9434 | A | 269.8064 | P |
| | | associated antigen 112 | | | | | | |
| MmugDNA.37205.1.S1_at | LOC713800 | similar to plexin A2 | Mmu.15066 | XP_001110877 /// | 40.86835 | A | 95.29446 | P |
| | | | | XP_001110951 /// | | | | |
| | | | | XP_001110980 | | | | |
| MmugDNA.33340.1.S1_at | LOC713882 | similar to smooth muscle myosin | Mmu.14493 | XP_001109108 /// | 7.818644 | A | 114.8105 | P |
| | | heavy chain 11 isoform SM1A | | XP_001109220 /// | | | | |
| | | | | XP_001109323 /// | | | | |
| | | | | XP_001109374 /// | | | | |
| | | | | XP_001109425 /// | | | | |
| | | | | XP_001109463 | | | | |
| MmuSTS.3126.1.S1_at | LOC713917 | similar to neuronal guanine | Mmu.4419 | XP_001114604 | 89.85418 | A | 191.6622 | P |
| | | nucleotide exchange factor | | | | | | |
| MmuSTS.1097.1.S1_at | LOC714170 | similar to progestin and adipoQ | Mmu.11914 | XP_001111860 | 62.66206 | A | 124.0636 | P |
| | | receptor family member IX | | | | | | |
| MmugDNA.26038.1.S1_at | LOC714370 | Similar to decay accelerating | Mmu.1237 | XP_001111953 /// | 10.7786 | A | 155.9851 | P |
| | | factor for complement | | XP_001111994 /// | | | | |
| | | | | XP_001112031 /// | | | | |
| | | | | XP_001112064 /// | | | | |
| | | | | XP_001112134 /// | | | | |
| | | | | XP_001112168 /// | | | | |
| | | | | XP_001112209 /// | | | | |
| | | | | XP_001112247 /// | | | | |
| | | | | XP_001112287 /// | | | | |
| | | | | XP_001112321 | | | | |
| MmugDNA.18856.1.S1_at | LOC714749 | similar to Rsb-66 protein | Mmu.15699 | XP_001104349 /// | 73.02561 | A | 90.52779 | P |
| | | | | XP_001104431 /// | | | | |
| | | | | XP_001104509 /// | | | | |
| | | | | XP_001104586 | | | | |
| MmugDNA.30186.1.S1_at | LOC714958 | similar to Protein C19orf15 | Mmu.15418 | XP_001106958 /// | 63.63976 | A | 198.4253 | P |
| | | precursor | | XP_001107205 /// | | | | |
| | | | | XP_001107270 | | | | |
| MmugDNA.41904.1.S1_at | LOC715138 | similar to transmembrane | Mmu.11792 | XP_001107212 /// | 20.71842 | A | 109.4672 | P |
| | | protease, serine 2 | | XP_001107275 | | | | |
| MmugDNA.43404.1.S1_at | LOC715295 | similar to p53-induced protein | — | XP_001105448 | 182.3128 | A | 279.0873 | P |
| MmugDNA.13984.1.S1_at | LOC715330 | Similar to beta-site APP-cleaving | Mmu.1613 | XP_001107950 /// | 31.46918 | A | 188.1045 | P |
| | | enzyme 2 isoform C | | XP_001108061 | | | | |
| | | preproprotein | | | | | | |
| MmugDNA.23412.1.S1_x_at | LOC715553 | similar to Protein PP2447 | Mmu.16050 | XP_001111734 /// | 651.9257 | A | 749.3463 | P |
| | | | | XP_001111774 /// | | | | |
| | | | | XP_001111813 /// | | | | |
| | | | | XP_001111850 /// | | | | |
| | | | | XP_001111878 /// | | | | |
| | | | | XP_001111918 /// | | | | |
| | | | | XP_001111956 | | | | |
| MmuSTS.563.1.S1_at | LOC715706 | Similar to schlafen family | Mmu.11333 | XP_001114176 /// | 47.03052 | A | 86.69991 | P |
| | | member 13 | | XP_001114192 /// | | | | |
| | | | | XP_001114211 | | | | |
| MmugDNA.23724.1.S1_at | LOC715752 | similar to zinc finger protein 44 | Mmu.13185 | XP_001107149 /// | 177.6898 | A | 141.1652 | P |
| | | | | XP_001107204 /// | | | | |
| | | | | XP_001107269 | | | | |
| MmugDNA.30744.1.S1_s_at | LOC715853 | similar to interphase | Mmu.13940 | XP_001113603 | 221.8494 | A | 178.2616 | P |
| | | cyctoplasmic foci protein 45 | | | | | | |
| MmugDNA.11990.1.S1_at | LOC716153 | similar to myelin gene | Mmu.13074 | XP_001106720 | 32.29033 | A | 95.01642 | P |
| | | expression factor 2 | | | | | | |
| MmugDNA.36922.1.S1_at | LOC716153 | similar to myelin gene | Mmu.13074 | XP_001106720 | 71.02611 | A | 102.504 | P |
| | | expression factor 2 | | | | | | |
| MmugDNA.40257.1.S1_at | LOC716245 | similar to sphingosine-1- | Mmu.4100 | XP_001106861 | 122.3767 | A | 123.3001 | P |
| | | phosphate lyase 1 | | | | | | |
| MmugDNA.36455.1.S1_at | LOC716351 | similar to SEC22 vesicle | Mmu.14967 | XP_001115262 /// | 162.7943 | A | 119.6179 | P |
| | | trafficking protein homolog C | | XP_001115277 /// | | | | |
| | | isoform b | | XP_001115291 /// | | | | |
| | | | | XP_001115333 /// | | | | |
| | | | | XP_001115349 /// | | | | |
| | | | | XP_001115363 /// | | | | |
| | | | | XP_001115380 | | | | |
| MmuSTS.2718.1.S1_at | LOC716439 | similar to filamin A interacting | Mmu.12823 | XP_001113081 /// | 20.86039 | A | 142.4841 | P |
| | | protein 1 | | XP_001113105 /// | | | | |
| | | | | XP_001113142 /// | | | | |
| | | | | XP_001113175 | | | | |
| MmugDNA.18150.1.S1_at | LOC716504 | similar to Cdc42 effector protein 2 | — | XP_001113902 /// | 45.00316 | A | 317.3692 | P |
| | | | | XP_001113931 | | | | |
| MmugDNA.10063.1.S1_at | LOC716601 | similar to UPF3 regulator of | Mmu.13132 | XP_001107426 | 35.87898 | A | 178.3976 | P |
| | | nonsense transcripts homolog A | | | | | | |
| | | isoform hUpf3p | | | | | | |
| MmugDNA.2703.1.S1_at | LOC716903 | hypothetical protein LOC716903 | Mmu.15043 | XP_001115326 /// | 21.5953 | A | 134.5116 | P |
| | | | | XP_001115372 /// | | | | |
| | | | | XP_001115386 /// | | | | |
| | | | | XP_001115400 | | | | |
| Mmu.8945.1.S1_at | LOC717346 | similar to complement factor H | Mmu.4677 | XP_001111499 /// | 90.61079 | A | 197.2676 | P |
| | | isoform a precursor | | XP_001111535 /// | | | | |
| | | | | XP_001111875 | | | | |
| MmugDNA.17230.1.S1_at | LOC717350 | similar to ets homologous factor | Mmu.15764 | XP_001115436 /// | 66.78262 | A | 86.82366 | P |
| | | | | XP_001115449 /// | | | | |
| | | | | XP_001115455 /// | | | | |
| | | | | XP_001115469 /// | | | | |
| | | | | XP_001115487 /// | | | | |
| | | | | XP_001115502 /// | | | | |
| | | | | XP_001115517 | | | | |
| MmugDNA.20406.1.S1_at | LOC717474 | similar to GLE1-like, RNA export | Mmu.12903 | XP_001110762 /// | 182.8572 | A | 225.2607 | P |
| | | mediator isoform 1 | | XP_001110844 | | | | |
| MmugDNA.22554.1.S1_s_at | LOC717764 | similar to phospholipase C, beta | Mmu.11823 | XP_001115104 | 294.9439 | A | 463.7735 | P |
| | | 3 (phosphatidylinositol-specific) | | | | | | |
| MmugDNA.41138.1.S1_at | LOC717824 | similar to mago-nashi homolog | Mmu.2413 | XP_001115401 /// | 56.18679 | A | 182.9515 | P |
| | | | | XP_001115410 | | | | |
| MmugDNA.478.1.S1_at | LOC718703 | similar to TEA domain family | Mmu.15394 | XP_001114796 /// | 18.20921 | A | 131.8721 | P |
| | | member 2 | | XP_001114808 /// | | | | |
| | | | | XP_001114818 /// | | | | |
| | | | | XP_001114832 | | | | |
| MmugDNA.40598.1.S1_at | LOC719284 | similar to Duffy blood group | Mmu.10996 | XP_001117188 /// | 79.40461 | A | 157.7951 | P |
| | | | | XP_001117194 /// | | | | |
| | | | | XP_001117200 | | | | |
| MmugDNA.8485.1.S1_at | LOC719645 | similar to H326 | Mmu.153 | XP_001117421 /// | 55.48396 | A | 132.2252 | P |
| | | | | XP_001117432 /// | | | | |
| | | | | XP_001117435 /// | | | | |
| | | | | XP_001117439 /// | | | | |
| | | | | XP_001117441 /// | | | | |
| | | | | XP_001117445 /// | | | | |
| | | | | XP_001117452 /// | | | | |
| | | | | XP_001117454 /// | | | | |
| | | | | XP_001117459 /// | | | | |
| | | | | XP_001117461 /// | | | | |
| | | | | XP_001117464 /// | | | | |
| | | | | XP_001117465 /// | | | | |
| | | | | XP_001117470 /// | | | | |
| | | | | XP_001117473 | | | | |
| MmuSTS.2495.1.S1_at | LOC719814 | similar to zinc finger protein 577 | Mmu.15382 | XP_001116472 /// | 105.0435 | A | 133.1272 | P |
| | | | | XP_001116485 /// | | | | |
| | | | | XP_001116492 | | | | |
| MmugDNA.11286.1.S1_at | LOC720186 | similar to immunoglobulin | Mmu.11138 | XP_001115307 | 385.697 | A | 457.8605 | P |
| | | superfamily, member 8 | | | | | | |
| MmugDNA.1499.1.S1_at | LOC721262 | similar to Pigment epithelium- | Mmu.12605 | XP_001117361 | 90.36726 | A | 288.4651 | P |
| | | derived factor precursor (PEDF) | | | | | | |
| | | (EPC-1) | | | | | | |
| MmunewRS.138.1.S1_at | LOC721825 | similar to cAMP responsive element binding | Mmu.11710 | XP_001118020 | 87.49419 | A | 146.52 | P |
| | | protein 3-like 3 | | | | | | |
| MmugDNA.39283.1.S1_at | LOC721914 | similar to olfactory receptor, | Mmu.13643 | XP_001118110 | 76.79032 | A | 189.9431 | P |
| | | family 2, subfamily A, member 7 | | | | | | |
| Mmu.15041.1.S1_at | MAOA | monoamine oxidase A | Mmu.3283 | XP_001096840 | 63.99507 | A | 84.97249 | P |
| MmugDNA.21143.1.S1_at | MAOA | monoamine oxidase A | Mmu.3283 | XP_001096840 | 127.6487 | A | 588.567 | P |
| MmugDNA.25736.1.S1_at | MDGA2 | MAM domain containing | Mmu.16277 | XP_001097241 /// | 18.25484 | A | 68.81326 | P |
| | | glycosylphosphatidylinositol | | XP_001097344 /// | | | | |
| | | anchor 2 | | XP_001097446 /// | | | | |
| | | | | XP_001097544 /// | | | | |
| | | | | XP_001097646 | | | | |
| MmugDNA.32119.1.S1_at | ME1 | malic enzyme 1, NADP(+)-dependent, | Mmu.11722 | XP_001084298 /// | 8.007969 | A | 80.68948 | P |
| | | cytosolic | | XP_001084419 /// | | | | |
| | | | | XP_001084539 /// | | | | |
| | | | | XP_001084663 /// | | | | |
| | | | | XP_001084781 /// | | | | |
| | | | | XP_001084901 | | | | |
| MmugDNA.20648.1.S1_at | MFAP3 | microfibrillar-associated protein 3 | Mmu.1139 | XP_001102567 | 209.1429 | A | 166.2625 | P |
| MmugDNA.27696.1.S1_at | MMP26 | matrix metallopeptidase 26 | Mmu.3669 | XP_001112141 | 53.29844 | A | 76.93641 | P |
| MmugDNA.22230.1.S1_s_at | MMP28 | matrix metallopeptidase 28 | Mmu.3666 | XP_001114445 | 123.8551 | A | 161.2347 | P |
| MmugDNA.15929.1.S1_at | MRAS | muscle RAS oncogene homolog | Mmu.14559 | XP_001114261 /// | 44.73249 | A | 123.0301 | P |
| | | | | XP_001114274 /// | | | | |
| | | | | XP_001114299 /// | | | | |
| | | | | XP_001114317 | | | | |
| MmuSTS.4170.1.S1_at | MRAS | muscle RAS oncogene homolog | Mmu.14559 | XP_001114261 /// | 150.9189 | A | 182.644 | P |
| | | | | XP_001114274 /// | | | | |
| | | | | XP_001114299 /// | | | | |
| | | | | XP_001114317 | | | | |
| Mmu.14436.1.S1_at | MRC1 | mannose receptor, C type 1 | Mmu.1302 | XP_001091661 /// | 42.83043 | A | 113.4529 | P |
| | | | | XP_001091901 | | | | |
| MmugDNA.31263.1.S1_at | MRGPRX4 | MAS-related GPR, member X4 | Mmu.9516 | NP_001035708 /// | 18.23305 | A | 173.069 | P |
| | | | | XP_001086954 | | | | |
| MmugDNA.13215.1.S1_at | MYO5B | myosin VB | Mmu.15475 | XP_001090434 /// | 76.57364 | A | 138.2834 | P |
| | | | | XP_001090545 /// | | | | |
| | | | | XP_001090668 | | | | |
| MmugDNA.42474.1.S1_at | NCAM1 | neural cell adhesion molecule 1 | Mmu.11207 | XP_001082236 /// | 145.3389 | A | 147.3262 | P |
| | | | | XP_001082361 /// | | | | |
| | | | | XP_001083241 /// | | | | |
| | | | | XP_001083366 /// | | | | |
| | | | | XP_001083486 /// | | | | |
| | | | | XP_001083597 /// | | | | |
| | | | | XP_001083697 /// | | | | |
| | | | | XP_001083809 /// | | | | |
| | | | | XP_001083924 | | | | |
| MmugDNA.3439.1.S1_at | NEB | nebulin | Mmu.10774 | XP_001084585 | 4.838272 | A | 107.4847 | P |
| MmugDNA.10723.1.S1_at | NECAP2 | NECAP endocytosis associated 2 | Mmu.3233 | XP_001086937 /// | 142.5812 | A | 201.7808 | P |
| | | | | XP_001087060 | | | | |
| Mmu.6763.1.S1_at | NEU1 | sialidase 1 (lysosomal sialidase) | Mmu.1002 | XP_001113418 /// | 414.9135 | A | 679.2563 | P |
| | | | | XP_001113467 /// | | | | |
| | | | | XP_001113496 | | | | |
| MmugDNA.26632.1.S1_at | NMNAT3 | nicotinamide nucleotide | Mmu.14941 | XP_001113328 /// | 100.2686 | A | 285.6383 | P |
| | | adenylyltransferase 3 | | XP_001113354 /// | | | | |
| | | | | XP_001113387 /// | | | | |
| | | | | XP_001113417 /// | | | | |
| | | | | XP_001113442 | | | | |
| MmugDNA.28543.1.S1_at | NR4A2 | Nuclear receptor subfamily 4, group A, | Mmu.11507 | XP_001085438 /// | 67.00845 | A | 110.9794 | P |
| | | member 2 | | XP_001085797 /// | | | | |
| | | | | XP_001085905 /// | | | | |
| | | | | XP_001086011 /// | | | | |
| | | | | XP_001086128 /// | | | | |
| | | | | XP_001086234 /// | | | | |
| | | | | XP_001086356 /// | | | | |
| | | | | XP_001086593 /// | | | | |
| | | | | XP_001086719 | | | | |
| MmugDNA.38502.1.S1_at | NRXN1 | neurexin 1 | Mmu.4429 | XP_001114208 | 18.97834 | A | 126.3031 | P |
| MmuSTS.4647.1.S1_at | NTNG2 | netrin G2 | Mmu.15124 | XP_001082464 /// | 3.059485 | A | 101.9615 | P |
| | | | | XP_001082588 /// | | | | |
| | | | | XP_001082730 /// | | | | |
| | | | | XP_001082854 | | | | |
| Mmu.2344.1.S1_at | NXPH4 | neurexophilin 4 | Mmu.3606 | XP_001099977 | 143.7606 | A | 166.9342 | P |
| Mmu.14635.1.S1_s_at | P11 | placental protein 11 | Mmu.1192 | XP_001097398 /// | 3.029125 | A | 102.4633 | P |
| | | | | XP_001097492 /// | | | | |
| | | | | XP_001097588 /// | | | | |
| | | | | XP_001097705 /// | | | | |
| | | | | XP_001097799 | | | | |
| MmuSTS.1070.1.S1_at | PAH | phenylalanine hydroxylase | Mmu.11888 | XP_001094859 | 24.82761 | A | 66.58179 | P |
| MmugDNA.3732.1.S1_at | PCGF2 | polycomb group ring finger 2 | Mmu.17122 | XP_001083603 /// | 7.621283 | A | 94.5854 | P |
| | | | | XP_001083705 /// | | | | |
| | | | | XP_001083817 | | | | |
| MmugDNA.30313.1.S1_at | PFKFB1 | 6-phosphofructo-2-kinase/fructose-2,6- | Mmu.15267 | XP_001091669 /// | 76.07756 | A | 92.32727 | P |
| | | biphosphatase 1 | | XP_001091781 /// | | | | |
| | | | | XP_001091907 | | | | |
| MmuSTS.2247.1.S1_at | PLG | plasminogen | Mmu.3024 | NP_001036540 /// | 48.69508 | A | 71.0714 | P |
| | | | | XP_001099441 | | | | |
| MmugDNA.5295.1.S1_s_at | PNLIPRP2 | pancreatic lipase-related protein 2 | Mmu.3256 | XP_001095293 | 9.050271 | A | 134.0069 | P |
| MmugDNA.15066.1.S1_at | PPM1F | protein phosphatase 1F | Mmu.13045 | XP_001089477 | 112.9894 | A | 349.5799 | P |
| MmugDNA.21620.1.S1_at | PPP5C | protein phosphatase 5, catalytic | Mmu.11271 | XP_001111636 /// | 604.6081 | A | 644.2534 | P |
| | | subunit | | XP_001111674 /// | | | | |
| | | | | XP_001111714 /// | | | | |
| | | | | XP_001111749 | | | | |
| MmugDNA.39032.1.S1_at | PRDX6 | Peroxiredoxin 6 | Mmu.4290 | XP_001101473 | 34.28012 | A | 142.5283 | P |
| MmugDNA.31823.1.S1_at | PRKACB | protein kinase, cAMP-dependent, | Mmu.1940 | XP_001105459 /// | 145.2954 | A | 122.2689 | P |
| | | catalytic, beta | | XP_001105534 /// | | | | |
| | | | | XP_001105605 /// | | | | |
| | | | | XP_001105676 /// | | | | |
| | | | | XP_001105747 /// | | | | |
| | | | | XP_001105803 /// | | | | |
| | | | | XP_001105875 /// | | | | |
| | | | | XP_001105953 /// | | | | |
| | | | | XP_001106026 /// | | | | |
| | | | | XP_001106097 /// | | | | |
| | | | | XP_001106164 | | | | |
| MmugDNA.36754.1.S1_at | PRR3 | proline rich 3 | Mmu.12623 | XP_001100535 | 92.55525 | A | 104.1183 | P |
| Mmu.12.1.S1_at | RASSF8 | Ras association (RalGDS/AF-6) domain family | Mmu.13028 | XP_001102028 /// | 31.62563 | A | 82.27078 | P |
| | | (N-terminal) member 8 | | XP_001102115 /// | | | | |
| | | | | XP_001102201 | | | | |
| MmuSTS.2090.1.S1_at | RBM11 | RNA binding motif protein 11 | Mmu.12892 | XP_001083260 | 81.05433 | A | 85.9953 | P |
| MmugDNA.7677.1.S1_at | RBM34 | RNA binding motif protein 34 | Mmu.12653 | XP_001102020 /// | 139.6196 | A | 60.82475 | P |
| | | | | XP_001102111 | | | | |
| MmugDNA.17401.1.S1_at | SEC24A | SEC24 family, member A (S. cerevisiae) | Mmu.13387 | XP_001109569 /// | 32.50195 | A | 160.1317 | P |
| | | | | XP_001109620 | | | | |
| MmugDNA.18877.1.S1_at | SF3B14 | similar to splicing factor 3B, 14 kDa subunit | Mmu.942 | XP_001098393 | 96.04313 | A | 144.1895 | P |
| MmuSTS.3315.1.S1_at | SH3GLB2 | SH3-domain GRB2-like | Mmu.17131 | XP_001109262 | 415.9608 | A | 360.3215 | P |
| | | endophilin B2 | | | | | | |
| MmugDNA.28147.1.S1_at | SLC13A2 | solute carrier family 13 (sodium- | Mmu.11776 | XP_001106342 | 83.45712 | A | 172.6272 | P |
| | | dependent dicarboxylate | | | | | | |
| | | transporter), member 2 | | | | | | |
| MmugDNA.20608.1.S1_at | SLC25A11 | Solute carrier family 25 | Mmu.11522 | XP_001097307 /// | 159.8107 | A | 199.7657 | P |
| | | (mitochondrial carrier; | | XP_001097413 /// | | | | |
| | | oxoglutarate carrier), member | | XP_001097514 | | | | |
| | | 11 | | | | | | |
| MmugDNA.34347.1.S1_s_at | SLC25A13 | solute carrier family 25, member | Mmu.11416 | XP_001088340 | 83.63106 | A | 130.7075 | P |
| | | 13 (citrin) | | | | | | |
| MmugDNA.43541.1.S1_at | SLC25A17 | Solute carrier family 25 (mitochondrial carrier; | Mmu.4154 | XP_001102293 | 135.3007 | A | 217.9323 | P |
| | | peroxisomal membrane protein, 34 kDa), member 17 | | | | | | |
| MmugDNA.26126.1.S1_at | SOX2 | SRY (sex determining region Y)- | Mmu.10959 | NP_001136412 /// | 25.83881 | A | 100.8555 | P |
| | | box 2 | | XP_001106891 | | | | |
| MmuAffx.1.1.S1_at | SRY | sex determining region Y | Mmu.3544 | NP_001028008 | 56.02947 | A | 91.99885 | P |
| MmugDNA.15062.1.S1_at | SSBP1 | Single-stranded DNA binding | Mmu.4481 | XP_001084058 /// | 129.9467 | A | 146.7887 | P |
| | | protein 1 | | XP_001084179 /// | | | | |
| | | | | XP_001084295 /// | | | | |
| | | | | XP_001084414 /// | | | | |
| | | | | XP_001084536 | | | | |
| MmugDNA.17880.1.S1_at | ST3GAL1 | ST3 beta-galactoside alpha-2,3- | Mmu.12091 | XP_001088980 /// | 127.049 | A | 295.4928 | P |
| | | sialyltransferase 1 | | XP_001089209 /// | | | | |
| | | | | XP_001089316 /// | | | | |
| | | | | XP_001089439 /// | | | | |
| | | | | XP_001089550 | | | | |
| MmugDNA.26812.1.S1_at | ST8SIA4 | ST8 alpha-N-acetyl-neuraminide | Mmu.13440 | XP_001097339 | 135.5056 | A | 84.99597 | P |
| | | alpha-2,8-sialyltransferase 4 | | | | | | |
| MmugDNA.27466.1.S1_at | TAF11 | similar to Transcription initiation | Mmu.9248 | — | 94.84025 | A | 93.78352 | P |
| | | factor TFIID subunit 11 | | | | | | |
| | | (Transcription initiation factor | | | | | | |
| | | TFIID 28 kDa subunit) | | | | | | |
| | | (TAF(II)28) (TAFII-28) | | | | | | |
| | | (TAFII28) (TFIID subunit p30- | | | | | | |
| | | beta) | | | | | | |
| MmugDNA.17390.1.S1_at | TAR1 | trace amine receptor 1 | Mmu.16488 | NP_001074234 /// | 43.22684 | A | 83.6374 | P |
| | | | | XP_001102243 | | | | |
| MmugDNA.27658.1.S1_at | TCEA2 | transcription elongation factor A | Mmu.229 | XP_001082344 /// | 73.96481 | A | 92.49038 | P |
| | | (SII), 2 | | XP_001082860 /// | | | | |
| | | | | XP_001082986 /// | | | | |
| | | | | XP_001083100 /// | | | | |
| | | | | XP_001083220 /// | | | | |
| | | | | XP_001083344 | | | | |
| MmugDNA.8481.1.S1_at | TES | Testis derived transcript (3 LIM | Mmu.4028 | XP_001095286 | 52.37125 | A | 122.8702 | P |
| | | domains) | | | | | | |
| MmugDNA.9561.1.S1_at | TIMP-2 | tissue inhibitor of matrix | Mmu.1702 | XP_001106657 | 369.0166 | A | 888.6364 | P |
| | | metalloproteinase-2 | | | | | | |
| MmugDNA.502.1.S1_at | TIRAP | toll-interleukin 1 receptor (TIR) | Mmu.17493 | NP_001123907 /// | 205.38 | A | 386.3123 | P |
| | | domain containing adaptor | | XP_001112918 /// | | | | |
| | | protein | | XP_001112950 | | | | |
| MmugDNA.31314.1.S1_at | TMLHE | trimethyllysine hydroxylase, | Mmu.15229 | XP_001099467 /// | 183.9673 | A | 362.3624 | P |
| | | epsilon | | XP_001099575 /// | | | | |
| | | | | XP_001099674 | | | | |
| MmugDNA.86.1.S1_at | TRHDE | thyrotropin-releasing hormone | Mmu.130 | XP_001109391 | 53.7547 | A | 144.0242 | P |
| | | degrading enzyme | | | | | | |
| MmugDNA.13477.1.S1_at | TSHR | thyroid stimulating hormone | Mmu.3677 | XP_001104765 /// | 3.757645 | A | 64.06719 | P |
| | | receptor | | XP_001104839 | | | | |
| Mmu.5321.1.S1_at | TTC12 | tetratricopeptide repeat domain | Mmu.13011 | XP_001084384 /// | 108.8476 | A | 237.5948 | P |
| | | 12 | | XP_001084508 /// | | | | |
| | | | | XP_001084630 /// | | | | |
| | | | | XP_001084748 /// | | | | |
| | | | | XP_001084868 /// | | | | |
| | | | | XP_001084979 | | | | |
| MmugDNA.39789.1.S1_at | TTC7A | tetratricopeptide repeat domain | Mmu.15863 | XP_001113285 /// | 151.4908 | A | 248.7907 | P |
| | | 7A | | XP_001113315 /// | | | | |
| | | | | XP_001113346 | | | | |
| MmugDNA.33980.1.S1_at | TTLL4 | tubulin tyrosine ligase-like | Mmu.15909 | XP_001094019 /// | 273.2361 | A | 328.0809 | P |
| | | family, member 4 | | XP_001094615 /// | | | | |
| | | | | XP_001094742 /// | | | | |
| | | | | XP_001094864 | | | | |
| MmugDNA.29140.1.S1_s_at | UGCGL1 | UDP-glucose ceramide | Mmu.12163 | XP_001091001 /// | 404.7524 | A | 510.9632 | P |
| | | glucosyltransferase-like 1 | | XP_001091120 /// | | | | |
| | | | | XP_001091250 /// | | | | |
| | | | | XP_001091373 /// | | | | |
| | | | | XP_001091494 | | | | |
| MmugDNA.13424.1.S1_at | USP21 | Ubiquitin specific peptidase 21 | Mmu.11289 | XP_001117752 /// | 43.01239 | A | 94.55185 | P |
| | | | | XP_001117766 /// | | | | |
| | | | | XP_001117768 /// | | | | |
| | | | | XP_001117772 /// | | | | |
| | | | | XP_001117777 /// | | | | |
| | | | | XP_001117779 /// | | | | |
| | | | | XP_001117782 /// | | | | |
| | | | | XP_001117786 | | | | |
| MmugDNA.20532.1.S1_at | WDR77 | WD repeat domain 77 | Mmu.4390 | XP_001105103 | 179.0304 | A | 536.4213 | P |
| MmugDNA.33665.1.S1_at | WDR8 | WD repeat domain 8 | Mmu.15190 | XP_001083578 /// | 178.8616 | A | 306.8982 | P |
| | | | | XP_001083787 /// | | | | |
| | | | | XP_001083904 /// | | | | |
| | | | | XP_001084011 | | | | |
| MmugDNA.26867.1.S1_at | XG | Xg blood group | Mmu.11499 | XP_001086077 /// | 29.58194 | A | 136.8591 | P |
| | | | | XP_001086193 | | | | |
| MmugDNA.19387.1.S1_at | ZDHHC3 | zinc finger, DHHC-type | Mmu.11811 | XP_001114690 /// | 387.6217 | A | 714.7256 | P |
| | | containing 3 | | XP_001114737 /// | | | | |
| | | | | XP_001114753 | | | | |
| MmugDNA.42763.1.S1_at | ZFAND5 | zinc finger, AN1-type domain 5 | Mmu.1639 | XP_001096078 /// | 2.943856 | A | 138.3536 | P |
| | | | | XP_001096191 /// | | | | |
| | | | | XP_001096312 /// | | | | |
| | | | | XP_001096433 /// | | | | |
| | | | | XP_001096545 | | | | |
| MmugDNA.29066.1.S1_at | ZNRD1 | zinc ribbon domain containing 1 | Mmu.17470 | NP_001108417 /// | 87.50885 | A | 120.7655 | P |
| | | | | XP_001105355 /// | | | | |
| | | | | XP_001105431 | | | | |

TABLE 4
Immediate early (1-hr post stroke) biomarkers identified by RNA analysis.

| Gene identifier | Gene name | Amino Acid Sequence |
|---|---|---|
| NP_006546.1 | synaptobrevin homolog YKT6 | SEQ ID NO: 1 |
| NP_001776.1 | cytidine deaminase | SEQ ID NO: 2 |
| EAW60338.1 | hypothetical protein FLJ20232 | SEQ ID NO: 3 |
| EAW67321.1 | centrosomal protein 164 kDa | SEQ ID NO: 4 |
| EAW71459.1 | WD repeat domain 8 | SEQ ID NO: 5 |
| EAW85140.1 | zinc finger CCCH-type containing 7A | SEQ ID NO: 6 |
| EAW89539.1 | TIMP metallopeptidase inhibitor 2 | SEQ ID NO: 7 |
| EAW96888.1 | zinc finger CCCH-type containing 10 | SEQ ID NO: 8 |
| BAB47442.1 | KIAA1813 protein | SEQ ID NO: 9 |
| BAB59061.1 | Pex1p-634del690 | SEQ ID NO: 10 |
| AAH09411.1 | WDR77 protein | SEQ ID NO: 11 |
| NP_001078929.1 | catenin delta-1 isoform 1A | SEQ ID NO: 12 |
| NP_071426.1 | leucine-rich repeat-containing protein 4 precursor | SEQ ID NO: 13 |
| NP_001099038.1 | kinesin-like protein KIF13A isoform d | SEQ ID NO: 14 |
| BAG53572.1 | unnamed protein product | SEQ ID NO: 15 |
| BAG54027.1 | unnamed protein product | SEQ ID NO: 16 |
| BAG57307.1 | unnamed protein product | SEQ ID NO: 17 |
| BAG63947.1 | unnamed protein product | SEQ ID NO: 18 |
| BAG64130.1 | unnamed protein product | SEQ ID NO: 19 |
| BAG58900.1 | unnamed protein product | SEQ ID NO: 20 |
| NP_148978.2 | cyclin-dependent kinase 16 isoform 2 | SEQ ID NO: 21 |
| NP_001135741.1 | vitamin K-dependent gamma-carboxylase isoform 2 | SEQ ID NO: 22 |
| NP_631981.2 | nucleolar protein 6 gamma isoform | SEQ ID NO: 23 |
| AAM94901.1 | AF311906_1 LIR-D1 precursor | SEQ ID NO: 24 |
| AAH35404.1 | PTK2 protein | SEQ ID NO: 25 |
| NP_733840.1 | NLR family member X1 isoform 2 | SEQ ID NO: 26 |
| AAN75525.1 | Rap1-interacting adaptor molecule | SEQ ID NO: 27 |
| NP_001171187.1 | Krueppel-like factor 11 isoform b | SEQ ID NO: 28 |
| NP_001171726.1 | trimethyllysine dioxygenase, mitochondrial isoform 2 | SEQ ID NO: 29 |
| | precursor | |
| CAD91343.1 | cytochrome P450 | SEQ ID NO: 30 |
| NP_115652.2 | rhomboid domain-containing protein 1 | SEQ ID NO: 31 |
| NP_079480.2 | traB domain-containing protein | SEQ ID NO: 32 |
| NP_954574.1 | histone-lysine N-methyltransferase setd3 isoform b | SEQ ID NO: 33 |
| NP_000112.1 | erythropoietin receptor precursor | SEQ ID NO: 34 |
| NP_001453.1 | N-formyl peptide receptor 2 | SEQ ID NO: 35 |
| NP_002420.1 | matrix metalloproteinase-19 isoform rasi-1 preproprotein | SEQ ID NO: 36 |
| NP_003098.1 | transcription factor SOX-4 | SEQ ID NO: 37 |
| NP_003134.1 | single-stranded DNA-binding protein, mitochondrial | SEQ ID NO: 38 |
| | precursor | |
| AAH16977.2 | PBX3 protein | SEQ ID NO: 39 |
| NP_001973.2 | receptor tyrosine-protein kinase erbB-3 isoform 1 precursor | SEQ ID NO: 40 |
| CAH72013.1 | RIO kinase 1 (yeast) | SEQ ID NO: 41 |
| 2IRT | A Chain, Initial Crystallographic Analyses Of A | SEQ ID NO: 42 |
| | Recombinant Interleukin-1 Receptor Antagonist Protein | |
| BAA91249.1 | unnamed protein product | SEQ ID NO: 43 |
| NP_000447.2 | sulfite oxidase, mitochondrial precursor | SEQ ID NO: 44 |
| CAB86601.1 | xce | SEQ ID NO: 45 |
| NP_057692.1 | armadillo repeat-containing X-linked protein 1 | SEQ ID NO: 46 |
| NP_057696.2 | mitoferrin-1 | SEQ ID NO: 47 |
| NP_064530.1 | endophilin-B2 | SEQ ID NO: 48 |

TABLE 5
Early biomarkers (2-hr post stroke) biomarkers identified by RNA analysis.

| Gene identifier | Gene name | Amino Acid Sequence |
|---|---|---|
| NP_060288.3 | WD repeat-containing protein WRAP73 | SEQ ID NO: 49 |
| NP_001776.1 | cytidine deaminase | SEQ ID NO: 50 |
| NP_001128651.1 | palmitoyltransferase ZDHHC3 isoform 1 | SEQ ID NO: 51 |
| NP_004197.1 | vesicle-trafficking protein SEC22c isoform b | SEQ ID NO: 52 |
| NP_001001890.1 | runt-related transcription factor 1 isoform AML1b | SEQ ID NO: 53 |
| NP_000457.1 | peroxisome biogenesis factor 1 | SEQ ID NO: 54 |
| NP_071426.1 | leucine-rich repeat-containing protein 4 precursor | SEQ ID NO: 13 |
| NP_003134.1 | single-stranded DNA-binding protein, mitochondrial | SEQ ID NO: 55 |
| NP_001003700.1 | ras-responsive element-binding protein 1 isoform 3 | SEQ ID NO: 56 |
| NP_001099038.1 | kinesin-like protein KIF13A isoform d | SEQ ID NO: 57 |
| NP_877434.2 | E3 ubiquitin-protein ligase RNF144B | SEQ ID NO: 58 |
| NP_031381.2 | heat shock protein HSP 90-beta | SEQ ID NO: 59 |
| NP_001011516.1 | PDZ and LIM domain protein 5 isoform e | SEQ ID NO: 60 |
| NP_000815.1 | glycine receptor subunit beta isoform A precursor | SEQ ID NO: 61 |
| NP_060516.2 | angiogenic factor with G patch and FHA domains 1 | SEQ ID NO: 62 |
| NP_057113.1 | dehydrogenase/reductase SDR family member 7 precursor | SEQ ID NO: 63 |
| NP_954574.1 | histone-lysine N-methyltransferase setd3 isoform b | SEQ ID NO: 33 |
| NP_057696.2 | mitoferrin-1 | SEQ ID NO: 47 |
| NP_039258.1 | pro-neuregulin-1, membrane-bound isoform isoform HRG- | SEQ ID NO: 64 |
| | alpha | |
| NP_005598.3 | focal adhesion kinase 1 isoform b | SEQ ID NO: 65 |

TABLE 6
Late biomarkers (24-hr post stroke) biomarkers identified by RNA analysis.

| Gene identifier | Gene name | Amino Acid Sequence |
|---|---|---|
| NP_005944.1 | metallothionein-2 | SEQ ID NO: 66 |
| NP_057692.1 | armadillo repeat-containing X-linked protein 1 | SEQ ID NO: 46 |
| NP_001128250.1 | pre-B-cell leukemia transcription factor 3 isoform 2 | SEQ ID NO: 67 |
| NP_000031.1 | apolipoprotein C-III precursor | SEQ ID NO: 68 |
| NP_057696.2 | mitoferrin-1 | SEQ ID NO: 47 |
| NP_079480.2 | traB domain-containing protein | SEQ ID NO: 69 |
| NP_001128651.1 | palmitoyltransferase ZDHHC3 isoform 1 | SEQ ID NO: 70 |
| NP_000425.1 | sialidase-1 precursor | SEQ ID NO: 71 |
| NP_006238.1 | serine/threonine-protein phosphatase 5 isoform 1 | SEQ ID NO: 72 |
| NP_631981.2 | nucleolar protein 6 gamma isoform | SEQ ID NO: 73 |
| NP_057427.3 | centromere protein F | SEQ ID NO: 74 |
| \|NP_543153.1 | sodium-dependent phosphate transport protein 2C | SEQ ID NO: 75 |
| NP_001171187.1 | Krueppel-like factor 11 isoform b | SEQ ID NO: 28 |
| NP_000231.1 | amine oxidase | SEQ ID NO: 76 |
| NP_004160.3 | serine hydroxymethyltransferase, cytosolic isoform 1 | SEQ ID NO: 77 |
| NP_848695.1 | minor histocompatibility antigen H13 isoform 2 | SEQ ID NO: 78 |
| NP_056973.2 | mediator of RNA polymerase II transcription subunit 15 | SEQ ID NO: 79 |
| | isoform b | |
| NP_077007.1 | methylosome protein 50 | SEQ ID NO: 80 |
| NP_064505.1 | UDP-glucose:glycoprotein glucosyltransferase 1 precursor | SEQ ID NO: 81 |
| NP_001001890.1 | runt-related transcription factor 1 isoform AML1b | SEQ ID NO: 82 |
| NP_005598.3 | focal adhesion kinase 1 isoform b | SEQ ID NO: 83 |
| NP_061916.3 | amyloid beta A4 precursor protein-binding family B member | SEQ ID NO: 84 |
| | 1-interacting protein | |
| NP_060516.2 | angiogenic factor with G patch and FHA domains 1 | SEQ ID NO: 62 |
| NP_000923.1 | 1-phosphatidylinositol-4,5-bisphosphate phosphodiesterase | SEQ ID NO: 85 |
| | beta-3 isoform 1 | |
| NP_071426.1 | leucine-rich repeat-containing protein 4 precursor | SEQ ID NO: 13 |
| NP_443100.1 | immunoglobulin superfamily member 8 | SEQ ID NO: 86 |
| NP_006546.1 | synaptobrevin homolog YKT6 | SEQ ID NO: 1 |
| NP_001129247.1 | calcium channel flower homolog isoform b | SEQ ID NO: 87 |
| NP_071906.1 | 5-azacytidine-induced protein 2 isoform a | SEQ ID NO: 88 |
| NP_954574.1 | histone-lysine N-methyltransferase setd3 isoform b | SEQ ID NO: 33 |
| NP_001135741.1 | vitamin K-dependent gamma-carboxylase isoform 2 | SEQ ID NO: 22 |
| NP_001776.1 | cytidine deaminase | SEQ ID NO: 2 |
| \|NP_031381.2 | heat shock protein HSP 90-beta | SEQ ID NO: 59 |
| NP_054872.2 | zinc finger CCCH domain-containing protein 7A | SEQ ID NO: 6 |
| NP_115652.2 | rhomboid domain-containing protein 1 | SEQ ID NO: 31 |
| NP_001034750.1 | toll/interleukin-1 receptor domain-containing adapter protein | SEQ ID NO: 89 |
| | isoform a | |
| NP_055047.2 | vesicle-associated membrane protein 2 | SEQ ID NO: 90 |
| NP_000568.1 | interleukin-1 receptor antagonist protein isoform 3 | SEQ ID NO: 91 |
| NP_039258.1 | pro-neuregulin-1, membrane-bound isoform isoform HRG- | SEQ ID NO: 64 |
| | alpha | |
| NP_060288.3 | WD repeat-containing protein WRAP73 | SEQ ID NO: 49 |
| NP_598012.1 | decorin isoform c precursor | SEQ ID NO: 92 |
| NP_001973.2 | receptor tyrosine-protein kinase erbB-3 isoform 1 precursor | SEQ ID NO: 40 |
| NP_001166237.1 | forkhead box protein P2 isoform V | SEQ ID NO: 93 |
| NP_000457.1 | peroxisome biogenesis factor 1 | SEQ ID NO: 54 |
| NP_000112.1 | erythropoietin receptor precursor | SEQ ID NO: 34 |
| NP_001078929.1 | catenin delta-1 isoform 1A | SEQ ID NO: 12 |
| \|NP_001176.1 | zinc-alpha-2-glycoprotein precursor | SEQ ID NO: 94 |
| NP_001171597.1 | immunoglobulin lambda-like polypeptide 5 | SEQ ID NO: 95 |
| NP_077278.1 | matrix metalloproteinase-28 isoform 1 preproprotein | SEQ ID NO: 96 |

TABLE 7
Proteins differentially expressed in the NHP model following MCAO

| 1-HR | Sequence ID | Sequence Name | pre Occlusion | 1 h |
|---|---|---|---|---|
| 47 | XP_001112525 | PREDICTED: similar to CD163 antigen isoform a [Macaca mulatta] | 0 | 12 |
| 146 | XP_001112106 | PREDICTED: similar to thyroid hormone receptor associated protein 2 [Macaca mulatta] | 0 | 5 |
| 145 | XP_001083301 | PREDICTED: cytochrome b-245, beta polypeptide (chronic granulomatous disease) isoform 1 | 0 | 4 |
| | | [Macaca mulatta] | | |
| 104 | XP_001083320 | PREDICTED: similar to protein kinase C, delta [Macaca mulatta] | 0 | 3 |
| 51 | XP_001090238 | PREDICTED: pyruvate kinase, muscle isoform 1 [Macaca mulatta] | 0 | 3 |
| 139 | XP_001111401 | PREDICTED: golgi autoantigen, golgin subfamily b, macrogolgin (with transmembrane signal), 1 | 0 | 3 |
| | | isoform 1 [Macaca mulatta] | | |
| 50 | NP_001038203 | pancreatic ribonuclease [Macaca mulatta] | 0 | 3 |
| 184 | XP_001117349 | PREDICTED: similar to alpha-2-plasmin inhibitor [Macaca mulatta] | 0 | 3 |
| 172 | XP_001104736 | PREDICTED: general transcription factor IIIC, polypeptide 4, 90 kDa [Macaca mulatta] | 0 | 3 |
| 2-HR | Sequence ID | Sequence Name | pre Occlusion | 2 h |
| 47 | XP_001112525 | PREDICTED: similar to CD163 antigen isoform a [Macaca mulatta] | 0 | 6 |
| 150 | XP_001082953 | PREDICTED: similar to alpha 2 type IX collagen [Macaca mulatta] | 0 | 4 |
| 42 | XP_001115663 | PREDICTED: similar to AKT1 substrate 1 (proline-rich) isoform 1 [Macaca mulatta] | 0 | 4 |
| 104 | XP_001083320 | PREDICTED: similar to protein kinase C, delta [Macaca mulatta] | 0 | 3 |
| 50 | NP_001038203 | pancreatic ribonuclease [Macaca mulatta] | 0 | 3 |
| 5 | XP_001111499 | PREDICTED: similar to complement factor H isoform a precursor isoform 1 [Macaca mulatta] | 0 | 3 |
| 184 | XP_001117349 | PREDICTED: similar to alpha-2-plasmin inhibitor [Macaca mulatta] | 0 | 2 |
| 87 | XP_001096042 | PREDICTED: similar to serine palmitoyltransferase, long chain base subunit 2 [Macaca mulatta] | 0 | 2 |
| 142 | XP_001111185 | PREDICTED: transforming growth factor, beta-induced, 68 kDa isoform 1 [Macaca mulatta] | 0 | 2 |
| 17 | XP_001090341 | PREDICTED: similar to WD repeat domain 19 [Macaca mulatta] | 0 | 2 |
| 117 | XP_001088176 | PREDICTED: similar to CG32699-PA [Macaca mulatta] | 0 | 2 |
| 161 | XP_001084230 | PREDICTED: similar to chemokine-like factor superfamily 3 isoform a [Macaca mulatta] | 0 | 2 |
| 128 | XP_001114075 | PREDICTED: similar to T-cell immunomodulatory protein [Macaca mulatta] | 0 | 2 |
| 129 | XP_001113081 | PREDICTED: similar to filamin A interacting protein 1 isoform 1 [Macaca mulatta] | 0 | 2 |
| 137 | XP_001109018 | PREDICTED: zinc finger protein 443 [Macaca mulatta] | 0 | 2 |
| 26 | XP_001083469 | PREDICTED: similar to apolipoprotein L2 [Macaca mulatta] | 0 | 2 |
| 32 | XP_001086062 | PREDICTED: similar to MADS box transcription enhancer factor 2, polypeptide C (myocyte | 0 | 2 |
| | | enhancer factor 2C) isoform 1 [Macaca mulatta] | | |
| 49 | XP_001105319 | PREDICTED: similar to phosphorylated CTD interacting factor 1 isoform 1 [Macaca mulatta] | 0 | 2 |
| 59 | XP_001109556 | PREDICTED: delta-tubulin [Macaca mulatta] | 0 | 2 |
| 124 | XP_001082131 | PREDICTED: similar to receptor interacting protein 140 [Macaca mulatta] | 0 | 2 |
| 166 | XP_001088368 | PREDICTED: carbonic anhydrase IX isoform 1 [Macaca mulatta] | 0 | 2 |
| 24- | | | | |
| HR | Sequence ID | Sequence Name | pre Occlusion | 24 h |
| 104 | XP_001083320 | PREDICTED: similar to protein kinase C, delta [Macaca mulatta] | 0 | 12 |
| 134 | XP_001104018 | PREDICTED: similar to NOD9 protein isoform 2 isoform 1 [Macaca mulatta] | 0 | 6 |
| 109 | XP_001095858 | PREDICTED: aspartyl-tRNA synthetase [Macaca mulatta] | 0 | 4 |
| 136 | XP_001114645 | PREDICTED: RAS p21 protein activator 4 [Macaca mulatta] | 0 | 4 |
| 161 | XP_001084230 | PREDICTED: similar to chemokine-like factor superfamily 3 isoform a [Macaca mulatta] | 0 | 4 |
| 51 | XP_001090238 | PREDICTED: pyruvate kinase, muscle isoform 1 [Macaca mulatta] | 0 | 3 |
| 58 | NP_001107821 | NLR family, pyrin domain containing 1 [Macaca mulatta] | 0 | 3 |
| 78 | XP_001089332 | PREDICTED: similar to Proteasome subunit alpha type 1 (Proteasome component C2) (Macropain | 0 | 3 |
| | | subunit C2) (Multicatalytic endopeptidase complex subunit C2) (Proteasome nu chain) (30 kDa | | |
| | | prosomal protein) (PROS-30) [Macaca mulatta] | | |
| 95 | XP_001102929 | PREDICTED: chitotriosidase isoform 1 [Macaca mulatta] | 0 | 3 |
| 116 | XP_001098308 | PREDICTED: L-plastin isoform 1 [Macaca mulatta] | 0 | 3 |
| 139 | XP_001111401 | PREDICTED: golgi autoantigen, golgin subfamily b, macrogolgin (with transmembrane signal), 1 | 0 | 3 |
| | | isoform 1 [Macaca mulatta] | | |
| 150 | XP_001082953 | PREDICTED: similar to alpha 2 type IX collagen [Macaca mulatta] | 0 | 3 |
| 17 | XP_001090341 | PREDICTED: similar to WD repeat domain 19 [Macaca mulatta] | 0 | 2 |
| 18 | XP_001093056 | PREDICTED: similar to solute carrier family 24 member 4 isoform 1 precursor isoform 1 | 0 | 2 |
| | | [Macaca mulatta] | | |
| 36 | XP_001097844 | PREDICTED: similar to Histidine acid phosphatase domain containing 1 isoform 1 [Macaca mulatta] | 0 | 2 |
| 38 | XP_001104918 | PREDICTED: similar to Transcription factor E3 isoform 1 [Macaca mulatta] | 0 | 2 |
| 50 | NP_001038203 | pancreatic ribonuclease [Macaca mulatta] | 0 | 2 |
| 57 | XP_001100504 | PREDICTED: similar to PDZ domain-containing guanine nucleotide exchange factor I isoform 1 | 0 | 2 |
| | | [Macaca mulatta] | | |
| 62 | XP_001116691 | PREDICTED: suppressin [Macaca mulatta] | 0 | 2 |
| 63 | XP_001085867 | PREDICTED: similar to cofactor required for Sp1 transcriptional activation, subunit 2, 150 kDa | 0 | 2 |
| | | [Macaca mulatta] | | |
| 75 | XP_001117192 | PREDICTED: similar to thyroid hormone receptor-associated protein 5 [Macaca mulatta] | 0 | 2 |
| 80 | XP_001092767 | PREDICTED: 2-deoxyribose-5-phosphate aldolase homolog [Macaca mulatta] | 0 | 2 |
| 87 | XP_001096042 | PREDICTED: similar to serine palmitoyltransferase, long chain base subunit 2 [Macaca mulatta] | 0 | 2 |
| 113 | XP_001100715 | PREDICTED: zinc finger protein 639 [Macaca mulatta] | 0 | 2 |
| 128 | XP_001114075 | PREDICTED: similar to T-cell immunomodulatory protein [Macaca mulatta] | 0 | 2 |
| 129 | XP_001113081 | PREDICTED: similar to filamin A interacting protein 1 isoform 1 [Macaca mulatta] | 0 | 2 |
| 145 | XP_001083301 | PREDICTED: cytochrome b-245, beta polypeptide (chronic granulomatous disease) isoform 1 | 0 | 2 |
| | | [Macaca mulatta] | | |
| 146 | XP_001112106 | PREDICTED: similar to thyroid hormone receptor associated protein 2 [Macaca mulatta] | 0 | 2 |
| 148 | XP_001087105 | PREDICTED: hypothetical protein [Macaca mulatta] | 0 | 2 |
| 163 | NP_001123907 | toll-interleukin 1 receptor (TIR) domain containing adaptor protein [Macaca mulatta] | 0 | 2 |
| 184 | XP_001117349 | PREDICTED: similar to alpha-2-plasmin inhibitor [Macaca mulatta] | 0 | 2 |

TABLE 8
Biomarkers identified by the proteomics study

| | | Amino Acid |
|---|---|---|
| Gene identifier | Gene name | Sequence |
| | Immediate early stroke biomarkers, 1-hr post stroke | |
| NP_004235.3 | scavenger receptor cysteine-rich type 1 protein M130 isoform | SEQ ID NO: 97 |
| NP_056150.1 | mediator of RNA polymerase II transcription subunit 13-like | SEQ ID NO: 98 |
| NP_000388.2 | cytochrome b-245 heavy chain | SEQ ID NO: 99 |
| NP_006245.2 | protein kinase C delta type | SEQ ID NO: 100 |
| NP_001193726.1 | pyruvate kinase isozymes M1/M2 isoform d | SEQ ID NO: 101 |
| NP_004478.3 | Golgin subfamily B member 1 | SEQ ID NO: 102 |
| NP_002924.1 | ribonuclease pancreatic precursor | SEQ ID NO: 103 |
| NP_001157281.1 | WD repeat-containing protein 81 isoform 1 | SEQ ID NO: 104 |
| NP_036336.2 | general transcription factor 3C polypeptide 4 | SEQ ID NO: 105 |
| | Early stroke biomarkers, 2-hr post stroke | |
| NP_004235.3 | scavenger receptor cysteine-rich type 1 protein M130 isoform | SEQ ID NO: 97 |
| NP_001843.1 | collagen alpha-2(IX) chain precursor | SEQ ID NO: 106 |
| NP_001092103.1 | proline-rich AKT1 substrate 1 | SEQ ID NO: 107 |
| NP_006245.2 | protein kinase C delta type | SEQ ID NO: 100 |
| NP_002924.1 | ribonuclease pancreatic precursor | SEQ ID N0: 103 |
| NP_000177.2 | complement factor H isoform a precursor | SEQ ID NO: 108 |
| NP_001157281.1 | WD repeat-containing protein 81 isoform 1 | SEQ ID NO: 104 |
| NP_004854.1 | serine palmitoyltransferase 2 | SEQ ID NO: 109 |
| NP_000349.1 | transforming growth factor-beta-induced protein ig-h3 precursor | SEQ ID NO: 110 |
| NP_079408.3 | WD repeat-containing protein 19 | SEQ ID NO: 111 |
| NP_060309.2 | lysophosphatidylcholine acyltransferase 2 | SEQ ID NO: 112 |
| NP_653202.1 | CKLF-like MARVEL transmembrane domain-containing protein 3 | SEQ ID NO: 113 |
| NP_110417.2 | T-cell immunomodulatory protein precursor | SEQ ID NO: 114 |
| NP_056502.1 | filamin-A-interacting protein 1 | SEQ ID NO: 115 |
| NP_001074290.1 | zinc finger protein 799 | SEQ ID NO: 116 |
| NP_112092.1 | apolipoprotein L2 | SEQ ID NO: 117 |
| NP_001124477.1 | myocyte-specific enhancer factor 2C isoform 2 | SEQ ID NO: 118 |
| NP_071387.1 | phosphorylated CTD-interacting factor 1 | SEQ ID NO: 119 |
| NP_001180539.1 | tubulin delta chain isoform 3 | SEQ ID NO: 120 |
| NP_003480.2 | nuclear receptor-interacting protein 1 | SEQ ID NO: 121 |
| NP_001207.2 | carbonic anhydrase 9 precursor | SEQ ID NO: 122 |
| | Late stroke biomarkers, 24-hr post stroke | |
| NP_006245.2 | protein kinase C delta type | SEQ ID NO: 100 |
| NP_733840.1 | NLR family member X1 isoform 2 [Homo sapiens] | SEQ ID NO: 26 |
| NP_001340.2 | aspartyl-tRNA synthetase, cytoplasmic | SEQ ID NO: 123 |
| XP_003119104.1 | PREDICTED: putative Ras GTPase-activating protein 4B isoform 5 | SEQ ID NO: 124 |
| NP_653202.1 | CKLF-like MARVEL transmembrane domain-containing protein 3 | SEQ ID NO: 113 |
| NP_001193726.1 | pyruvate kinase isozymes M1/M2 isoform | SEQ ID NO: 101 |
| NP_127497.1 | NACHT, LRR and PYD domains-containing protein 1 isoform 1 | SEQ ID NO: 125 |
| NP_002777.1 | proteasome subunit alpha type-1 isoform 2 | SEQ ID NO: 126 |
| NP_003456.1 | chitotriosidase-1 precursor | SEQ ID NO: 127 |
| NP_002289.2 | plastin-2 | SEQ ID NO: 128 |
| NP_004478.3 | Golgin subfamily B member 1 | SEQ ID NO: 129 |
| NP_001843.1 | collagen alpha-2(IX) chain precursor | SEQ ID NO: 130 |
| NP_079408.3 | WD repeat-containing protein 19 | SEQ ID NO: 111 |
| NP_705932.2 | sodium/potassium/calcium exchanger 4 isoform 1 precursor | SEQ ID NO: 131 |
| NP_056031.2 | inositol hexakisphosphate and diphosphoinositol-pentakisphosphate | SEQ ID NO: 132 |
| | kinase 2 | |
| NP_006512.2 | transcription factor E3 | SEQ ID NO: 133 |
| NP_002924.1 | ribonuclease pancreatic precursor | SEQ ID NO: 103 |
| NP_001157861.1 | rap guanine nucleotide exchange factor 6 isoform 5 | SEQ ID NO: 134 |
| NP_066288.2 | deformed epidermal autoregulatory factor 1 homolog | SEQ ID NO: 135 |
| NP_004220.2 | mediator of RNA polymerase II transcription subunit 14 | SEQ ID NO: 136 |
| NP_005472.2 | mediator of RNA polymerase II transcription subunit 16 | SEQ ID NO: 137 |
| NP_057038.2 | putative deoxyribose-phosphate aldolase | SEQ ID NO: 138 |
| NP_004854.1 | serine palmitoyltransferase 2 | SEQ ID NO: 139 |
| NP_057415.1 | zinc finger protein 639 | SEQ ID NO: 140 |
| NP_110417.2 | T-cell immunomodulatory protein precursor | SEQ ID NO: 114 |
| NP_056502.1 | filamin-A-interacting protein 1 | SEQ ID NO: 115 |
| NP_000388.2 | cytochrome b-245 heavy chain | SEQ ID NO: 99 |
| NP_056150.1 | mediator of RNA polymerase II transcription subunit 13-like | SEQ ID NO: 98 |
| NP_689956.2 | BRCA1-associated ATM activator 1 | SEQ ID NO: 141 |
| NP_001034750.1 | toll/interleukin-1 receptor domain-containing adapter protein isoform a | SEQ ID NO: 142 |
| NP_001157281.1 | WD repeat-containing protein 81 isoform 1 | SEQ ID NO: 104 |

What is claimed is:

1. A method for diagnosing stroke in a subject comprising:
(a) measuring the level of one or more biomarkers in a sample from the subject;
(b) comparing the level of the one or more biomarkers to a reference level of the one or more biomarkers;
wherein the one or more biomarkers comprise gene products expressed from genes selected from the group consisting of IL-1α, IL-1β, IL-1ra, IL-3, IL-2, IL-4, IL-5, IL-6, IL-7, IL-8, IL-9, IL-10, IL-12 (p40), IL-12(p70), IL-13, IL-15, IL-17, EGF, Eotaxin, FGF-2, FTL-3 ligand, Fractalkine, G-CSF, GM-CSF, GRO, IFN-α2, IFN-γ, IP-10, MCP-1, MCP-3, MCD, MIP-1α, MIP-1β, PDGF-aa, PGDF-aa bb, RANTES, sCD40L, sIL2-rα, TNF-α, TNF-β, VEGF and genes listed in Tables 4, 5, 6 and 8.

2. The method of claim 1, wherein the one or more biomarkers are polynucleotides.

3. The method of claim 1, wherein the one or more biomarkers are peptides.

4. The method of claim 1, wherein step (a) includes measuring a panel of three or more biomarkers in the sample from the subject.

5. The method of claim 4, wherein the three or more biomarkers comprise expression product of at least one gene listed in Table 4, at least one gene listed in Table 5 and at least one gene listed in Table 6.

6. The method of claim 4, wherein the three or more biomarkers comprise
expression product of at least one gene selected from the group consisting of CD 163, PKC delta, pyruvate kinase, muscle (PKM2), thyroid hormone receptor associated protein 2, thyroid hormone receptor associated protein 5, nod-like receptor (NLR) family, pyrin domain containing 1, pancreatic ribonuclease (Rnase 1) and cytochrome b-245, beta polypeptide,
expression product of at least one gene selected from the group consisting of CD163, PKC delta, AKT1 substrate 1 (proline-rich) isoform 1, Cmtm3, WD repeat 19 (WDR19), alpha-2 type IX collagen, thyroid hormone receptor associated protein 2, thyroid hormone receptor associated protein 5, nod-like receptor (NLR) family, pyrin domain containing 1, pancreatic ribonuclease (Rnase 1), and complement factor H isoform a precursor; and
expression product of at least one gene selected from the group consisting of NOD9 (NLRK1), aspartyl-tRNAsynthetase, lymphocyte cytosolic protein 1 (L-plastin), chitinase 1 (chitotriosidase), proteasome subunit alpha type 1(PSMA4), PKC delta, Cmtm3, WDR19, alpha-2 type IX collagen, PKM2, thyroid hormone receptor associated protein 2, thyroid hormone receptor associated protein 5, nod-like receptor family, pyrin domain containing 1, pancreatic ribonuclease (Rnase 1), cytochrome b-245, beta polypeptide, and complement factor H isoform a precursor.

7. The method of claim 1, wherein step (a) includes measuring a panel of six or more biomarkers in the sample from the subject.

8. The method of claim 7, wherein the six or more biomarkers comprise expression product of at least two genes listed in Table 4, at least two genes listed in Table 5 and at least two genes listed in Table 6.

9. The method of claim 1, wherein step (a) includes measuring a panel of nine or more biomarkers in the sample from the subject.

10. The method of claim 9, wherein the nine or more biomarkers comprise expression product of at least three genes listed in Table 4, at least three genes listed in Table 5 and at least three genes listed in Table 6.

11. The method of claim 1, wherein step (a) includes measuring a panel of twenty or more biomarkers in the sample from the subject.

12. The method of claim 1 further comprising step (c) making a diagnosis based on the result of said comparing step (b).

13. The method of claim 1, wherein the sample is a body fluid sample or a tissue sample.

14. The method of claim 13, wherein the body fluid sample is a blood sample.

15. The method of claim 13, wherein the body fluid sample is a plasma or serum sample.

16. The method of claim 13, wherein the body fluid sample is a cerebrospinal fluid sample.

17. The method of claim 1, wherein the sample is peripheral blood mononuclear cells (PBMCs).

18. A method for determining disease progression in a subject after a stroke, comprising:
(a) measuring the level of one or more biomarkers in a first sample obtained from the subject at a first time point;
(b) measuring the level of the one or more biomarkers in a second sample obtained from the subject at a second time point;
(c) comparing the level of the one or more biomarkers at the first time point to the level of the one or more biomarkers at the second time point; and
(d) determining the disease progression between the first and the second time point based on the result of step (c),
wherein the one or more biomarkers comprise gene products expressed from genes selected from the group consisting of IL-1α, IL-1β, IL-1ra, IL-3, IL-2, IL-4, IL-5, IL-6, IL-7, IL-8, IL-9, IL-10, IL-12 (p40), IL-12(p70), IL-13, IL-15, IL-17, EGF, Eotaxin, FGF-2, FTL-3 ligand, Fractalkine, G-CSF, GM-CSF, GRO, IFN-α2, IFN-γ, IP-10, MCP-1, MCP-3, MCD, MIP-1α, MIP-113, PDGF-aa, PGDF-aa bb, RANTES, sCD40L, sIL2-rα, TNF-α, TNF-β, VEGF and genes listed in Tables 4, 5, 6 and 8.

19. A method for determining the efficacy of a treatment for stroke in a subject, comprising:
(a) measuring the level of one or more biomarkers in a first sample obtained from the subject at a first time point;
(b) measuring the level of the one or more biomarkers in a second sample obtained from the subject at a second time point, wherein the subject is under treatment at the second time point;
(c) comparing the level of the one or more biomarkers at the first time point to the level of the one or more biomarkers at the second time point; and
(d) determining the efficacy of the treatment based on the result of step (c), wherein the one or more biomarkers comprise gene products expressed from genes selected from the group consisting of IL-1α, IL-1β, IL-1ra, IL-3, IL-2, IL-4, IL-5, IL-6, IL-7, IL-8, IL-9, IL-10, IL-12 (p40), IL-12(p70), IL-13, IL-15, IL-17, EGF, Eotaxin, FGF-2, FTL-3 ligand, Fractalkine, G-CSF, GM-CSF, GRO, IFN-α2, IFN-γ, IP-10, MCP-1, MCP-3, MCD, MIP-1α, MIP-1β, PDGF-aa, PGDF-aa bb, RANTES, sCD40L, sIL2-rα, TNF-α, TNF-β, VEGF, NMDA receptor, neuronal specific enolase, GFAP, Apo C-III, MMP-9, D-dimer, CRP, brain natriuretic peptide, S100B and genes listed in Tables 4, 5, 6 and 8.

20. A kit for detecting biomarkers for stroke in a biological sample, comprising:
(a) reagents for detecting a panel of biomarkers for stroke, and
(b) a instruction listing the reference range for each of the biomarkers,
wherein the panel of biomarkers comprise two or more biomarkers, and wherein the two or more biomarkers comprise gene products expressed from genes selected from the group consisting of IL-1α, IL-1β, IL-1ra, IL-3, IL-2, IL-4, IL-5, IL-6, IL-7, IL-8, IL-9, IL-10, IL-12 (p40), IL-12(p70), IL-13, IL-15, IL-17, EGF, Eotaxin, FGF-2, FTL-3 ligand, Fractalkine, G-CSF, GM-CSF, GRO, IFN-α2, IFN-γ, IP-10, MCP-1, MCP-3, MCD, MIP-1α, MIP-1β, PDGF-aa, PGDF-aa bb, RANTES, sCD40L, sIL2-rα, TNF-α, TNF-β, VEGF, NMDA receptor, neuronal specific enolase, GFAP, Apo C-III, MMP-9, D-dimer, CRP, brain natriuretic peptide, S100B and genes listed in Tables 4, 5, 6 and 8.

The application's sequence listing, which the Patent Office published only in electronic form, follows.

SEQUENCE LISTING (139 sequences)

SEQ ID NO: 1 - protein, 198 aa, Homo sapiens
MKLYSLSVLYKGEAKVVLLKAAYDVSSFSFFQRSSVQEFMTFTSQLIVERSSKGTRASVKEQDYLCHVYVRNDSLAGVVIADNEYPSRVAFTLLEKVLDEFSKQVDRIDWPVGSPATIHYPALDGHLSRYQNPREADPMTKVQAELDETKIILHNTMESLLERGEKLDDLVSKSEVLGTQSKAFYKTARKQNSCCAIM

SEQ ID NO: 2 - protein, 146 aa, Homo sapiens [sequence omitted]

SEQ ID NO: 3 - protein, 478 aa, Homo sapiens
MAGAGERKGKKDDNGIGTAIDFVLSNARLVLGVGGAAMLGIATLAVKRMYDRAISAPTSPTRLSHSGKRSWEEPNWMGSPRLLNRDMKTGLSRSLQTLPTDSSTFDTDTFCPPRPKPVARKGQVDLKKSRLRMSLQEKLLTYYRNRAAIPAGEQARAKQAAVDICAELRSFLRAKLPDMPLRDMYLSGSLYDDLQVVTADHIQLIVPLVLEQNLWSCIPGEDTIMNVPGFFLVRRENPEYFPRGSSYWDRCVVGGYLSPKTVADTFEKVVAGSINWPAIGSLLDYVIRPAPPPEALTLEVQYERDKHLFIDFLPSVTLGDTVLVAKPHRLAQYDNLWRLSLRPAETARLRALDQADSGCRSLCLKILKAICKSTPALGHLTASQLTNVILHLAQEEADWSPDMLADRFLQALRGLISYLEAGVLPSALNPKDKALKERSLRHQVRMMEVDSRLNVSWKIQSLVGVWWPCFLPRQALLF

SEQ ID NO: 4 - protein, 1455 aa, Homo sapiens [sequence omitted]

SEQ ID NO: 5 - protein, 415 aa, Homo sapiens
MNFSEVFKLSSLLCKFSPDGKYLASCVQYRLVVRDVNTLQILQLYTCLDQIQHIEWSADSLFILCAMYKRGLVQVWSLEQPEWHCKIDEGSAGLVASCWSPDGRHILNTTEFHLRITVWSLCTKSVSYIKYPKACLQGITFTRDGRYMALAERRDCKDYVSIFVCSDWQLLRHFDTDTQDLTGIEWAPNGCVLAVWDTCLEVRILNHVTWKMITEFGHPAAINDPKIVVYKEAEKSPQLGLGCLSFPPPRAGAGPLPSSESKYEIASVPVSLQTLKPVTDRANPKIGIGMLAFSPDSYFLATRNDNIPNAVWVWDIQKLRLFAVLEQLSPVRAFQWDPQQPRLAICTGGSRLYLWSPAGCMSVQVPGEGDFAVLSLCWHLSGDSMALLSKDHFCLCFLETEAVVGTACRQLGGHT

SEQ ID NO: 6 - protein, 733 aa, Homo sapiens
MSNVSEERRKRQQNIKEGLQFIQSPLSYPGTQEQYAVYLRALVRNLFNEGNDVYREHDWNNSISQYTEALNIADYAKSEEILIPKEIIEKLYINRIACYSNMGFHDKVLEDCNIVLSLNASNCKALYRKSKALSDLGRYKKAYDAVAKCSLAVPQDEHVIKLTQELAQKLGFKIRKAYVRAELSLKSVPGDGATKALNHSVEDIEPDLLTPRQEAVPVVSLPAPSFSHEVGSELASVPVMPLTSILPLQVEESALPSAVLANGGKMPFTMPEAFLDDGDMVLGDELDDLLDSAPETNETVMMNGPGSLFASENFLGISSQPRNDFGNFFGSAVTKPSSSVTPRHPLEGTHELRQACQICFVKSGPKLMDFTYHANIDHKCKKDILIGRIKNVEDKSWKKIRPRPTKTNYEGPYYICKDVAAEEECRYSGHCTFAYCQEEIDVWTLERKGAFSREAFFGGNGKINLTVFKLLQEHLGEFIFLCEKCFDHKPRMISKRNKDNSTACSHPVTKHEFEDNKCLVHILRETTVKYSKIRSFHGQCQLDLCRHEVRYGCLREDECFYAHSLVELKVWIMQNETGISHDAIAQESKRYWQNLEANVPGAQVLGNQIMPGFLNMKIKFVCAQCLRNGQVIEPDKNRKYCSAKARHSWTKDRRAMRVMSIERKKWMNIRPLPTKKQMPLQFDLCNHIASGKKCQYVGNCSFAHSPEEREVWTYMKENGIQDMEQFYELWLKS

SEQ ID NO: 7 - protein, 179 aa, Homo sapiens [sequence omitted]

SEQ ID NO: 8 - protein, 526 aa, Homo sapiens
MSHAYFIHHRVWFRVCWLERHFFRRKRKSDRVGGSLSKLEDRQAAAATTAAAAEPSSDVEVETHRSPGLHLSYLSGHQEWQDKENPELGGTRMPDRDSYANGTGSSGGGPGGGGSEEASGAGVGSGGASSDAICRDFLRNVCKRGKRCRYRHPDMSEVSNLGVSKNEFIFCHDFQNKECSRPNCRFIHGSKEDEDGYKKTGELPPRLRQKVAAGLGLSPADLPNGKEEVPICRDFLKGDCQRGAKCKFRHLQRDFEFDARGGGGTGGGSTGSVLPGRRHDLYDIYDLPDRGFEDHEPGPKRRRGGCCPPDGPHFESYEYSLAPPRGVECRLLEEENAMLRKRVEELKKQVSNLLATNEVLLEQNAQFRNQAKVITLSSTAPATEQTLAPTVGTVATFNHGIAQTHTTLSSQALQPRPVSQQELVAPAGAPAAPPTNAAPPAAPPPPPPHLTPEITPLSAALAQTIAQGMAPPPVSMAPVAVSVAPVAPVAVSMAQPLAGITMSHTTTPMVTYPIASQSMRITAMPH

SEQ ID NO: 9 - protein, 673 aa, Homo sapiens
ASATMAIVQTLPVPLEPAPEAATAPQAPVMGSVSSLISGRPCPGGPAPPRHHGPPGPTFFRQQDGLLRGGYEAQEPLCPAVPPRKAVPVTSFTYINEDFRTESPPSPSSDVEDAREQRAHNAHLRGPPPKLIPVSGKLEKNMEKILIRPTAFKPVLPKPRGAPSLPSFMGPRATGLSGSQGSLTQLFGGPASSSSSSSSSSAADKPLAFSGWASGCPSGTLSDSGRNSLSSLPTYSTGGAEPTTSSPGGHLPSHGSGRGALPGPARGVPTGPSHSDSGRSSSSKSTGSLGGRVAGGLLGSGTRASPDSSSCGERSPPPPPPPPSDEALLHCVLEGKLRDREAELQQLRDSLDENEATMCQAYEERQRHWQREREALREDCAAQAQRAQRAQQLLQLQVFQLQQEKRQLQDDFAQLLQEREQLERRCATLEREQRELGPRLEETKWEVCQKSGEISLLKQQLKESQAELVQKGSELVALRVALREARATLRVSEGRARGLQEAARARELELEACSQELQRHRQEAEQLREKAGQLDAEAAGLREPPVPPATADPFLLAESDEAKVQRAAAGVGGSLRAQVERLRVELQRERRRGEEQRDSFEGERLAWQAEKEQVIRYQKQLQHNYIQMYRRNRQLEQELQQLSLELEARELADLGLAEQAPCICLEEITATEI

SEQ ID NO: 10 - protein, 1226 aa, Homo sapiens
MWGSDRLAGAGGGGAAVTVAFTNARDCFLHLPRRLVAQLHLLQNQAIEVVWSHQPAFLSWVEGRHFSDQGENVAEINRQVGQKLGLSNGGQVFLKPCSHVVSCQQVEVEPLSADDWEILELHAVSLEQHLLDQIRIVFPKAIFPVWVDQQTYIFIQIVALIPAASYGRLETDTKLLIQPKTRRAKENTFSKADAEYKKLHSYGRDQKGMMKELQTKQLQSNTVGITESNENESEIPVDSSSVASLWTMIGSIFSFQSEKKQETSWGLTEINAFKNMQSKVVPLDNIFRVCKSQPPSIYNASATSVFHKHCAIHVFPWDQEYFDVEPSFTVTYGKLVKLLSPKQQQSKTKQNVLSPEKEKQMSEPLDQKKIRSDHNEEDEKACVLQVVWNGLEELNNAIKYTKNVEVLHLGKVWIPDDLRKRLNIEMHAVVRITPVEVTPKIPRSLKLQPRENLPKDISEEDIKTVFYSWLQQSTTTMLPLVISEEEFIKLETKDGLKEFSLSIVHSWEKEKDKNIFLLSPNLLQKTTIQVLLDPMVKEENSEEIDFILPFLKLSSLGGVNSLGVSSLEHITHSLLGRPLSRQLMSLVAGLRNGALLLTGGKGSGKSTLAKAICKEAFDKLDAHVERVDCKALRALNDMIKEFISMGSLVALIATSQSQQSLHPLLVSAQGVHIFQCVQHIQPPNQEQRCEILCNVIKNKLDCDINKFTDLDLQHVAKETGGFVARDFTVLVDRAIHSRLSRQSISTREKLVLTTLDFQKALRGFLPASLRSVNLHKPRDLGWDKIGGLHEVRQILMDTIQLPAKYPELFANLPIRQRTGILLYGPPGTGKTLLAGVIARESRMNFISVKGPELLSKYIGASEQAVRDIFIRAQAAKPCILFFDEFESIAPRRGHDNTGVTDRVVNQLLTQLDGVEGLQGVYVLAATSRPDLIDPALLRPGRLDKCVYCPPPDQVSRLEILNVLSDSLPLADDVDLQHVASVTDSFTGADLKALLYNAQLEALHGMLLSSGLQDGSSSSDSDLSLSSMVFLNHSSGSDDSAGDGECGLDQSLVSLEMSEILPDESKFNMYRLYFGSSYESELGNGTSSDLSSQCLSAPSSMTQDLPGVPGKDQLFSQPPVLRTASQEGCQELTQEQRDQLRADISIIKGRYRSQSGEDESMNQPGPIKTRLAISQSHLMTALGHTRPSISEDDWKNFAELYESFQNPKRRKNQSGTMFRPGQKVTLA

SEQ ID NO: 11 - protein, 330 aa, Homo sapiens [sequence omitted]

SEQ ID NO: 12 - protein, 933 aa, Homo sapiens
MDDSEVESTASILASVKEQEAQFEKLTRALEEERRHVSAQLERVRVSPQDANPLMANGTLTRRHQNGRFVGDADLERQKFSDLKLNGPQDHSHLLYSTIPRMQEPGQIVETYTEEDPEGAMSVVSVETSDDGTTRRTETTVKKVVKTVTTRTVQPVAMGPDGLPVDASSVSNNYIQTLGRDFRKNGNGGPGPYVGQAGTATLPRNFHYPPDGYSRHYEDGYPGGSDNYGSLSRVTRIEERYRPSMEGYRAPSRQDVYGPQPQVRVGGSSVDLHRFHPEPYGLEDDQRSMGYDDLDYGMMSDYGTARRTGTPSDPRRRLRSYEDMIGEEVPSDQYYWAPLAQHERGSLASLDSLRKGGPPPPNWRQPELPEVIAMLGFRLDAVKSNAAAYLQHLCYRNDKVKTDVRKLKGIPVLVGLLDHPKKEVHLGACGALKNISFGRDQDNKIAIKNCDGVPALVRLLRKARDMDLTEVITGTLWNLSSHDSIKMEIVDHALHALTDEVIIPHSGWEREPNEDCKPRHIEWESVLTNTAGCLRNVSSERSEARRKLRECDGLVDALIFIVQAEIGQKDSDSKLVENCVCLLRNLSYQVHREIPQAERYQEAAPNVANNTGPHAASCFGAKKGKGKKPIEDPANDTVDFPKRTSPARGYELLFQPEVVRIYISLLKESKTPAILEASAGAIQNLCAGRWTYGRYIRSALRQEKALSAIADLLTNEHERVVKAASGALRNLAVDARNKELIGKHAIPNLVKNLPGGQQNSSWNFSEDTVISILNTINEVIAENLEAAKKLRETQGIEKLVLINKSGNRSEKEVRAAALVLQTIWGYKELRKPLEKEGWKKSDFQVNLNNASRSQSSHSYDDSTLPLIDRNQKSDKKPDREEIQMSNMGSNTKSLDNNYSTPNERGDHNRTLDRSGDLGDMEPLKGTTPLMQKI

SEQ ID NO: 13 - protein, 653 aa, Homo sapiens
MKLLWQVTVHHHTWNAILLPFVYLTAQVWILCAAIAAAASAGPQNCPSVCSCSNQFSKVVCTRRGLSEVPQGIPSNTRYLNLMENNIQMIQADTFRHLHHLEVLQLGRNSIRQIEVGAFNGLASLNTLELFDNWLTVIPSGAFEYLSKLRELWLRNNPIESIPSYAFNRVPSLMRLDLGELKKLEYISEGAFEGLFNLKYLNLGMCNIKDMPNLTPLVGLEELEMSGNHFPEIRPGSFHGLSSLKKLWVMNSQVSLIERNAFDGLASLVELNLAHNNLSSLPHDLFTPLRYLVELHLHHNPWNCDCDILWLAWWLREYIPTNSTCCGRCHAPMHMRGRYLVEVDQASFQCSAPFIMDAPRDLNISEGRMAELKCRTPPMSSVKWLLPNGTVLSHASRHPRISVLNDGTLNFSHVLLSDTGVYTCMVTNVAGNSNASAYLNVSTAELNTSNYSFFTTVTVETTEISPEDTTRKYKPVPTTSTGYQPAYTTSTTVLIQTTRVPKQVAVPATDTTDKMQTSLDEVMKTTKIIIGCFVAVTLLAAAMLIVFYKLRKRHQQRSTVTAARTVEIIQVDEDIPAATSAAATAAPSGVSGEGAVVLPTIHDHINYNTYKPAHGAHWTENSLGNSLHPTVTTISEPYIIQTHTKDKVQETQI

SEQ ID NO: 14 - protein, 1749 aa, Homo sapiens
MSDTKVKVAVRVRPMNRRELELNTKCVVEMEGNQTVLHPPPSNTKQGERKPPKVFAFDYCFWSMDESNTTKYAGQEVVFKCLGEGILEKAFQGYNACIFAYGQTGSGKSFSMMGHAEQLGLIPRLCCALFKRISLEQNESQTFKVEVSYMEIYNEKVRDLLDPKGSRQSLKVREHKVLGPYVDGLSQLAVTSFEDIESLMSEGNKSRTVAATNMNEESSRSHAVFNIIITQTLYDLQSGNSGEKVSKVSLVDLAGSERVSKTGAAGERLKEGSNINKSLTTLGLVISSLADQAAGKGKSKFVPYRDSVLTWLLKDNLGGNSQTSMIATISPAADNYEETLSTLRYADRAKRIVNHAVVNEDPNAKVIRELREEVEKLREQLSQAEAMKAPELKEKLEESEKLIKELTVTWEEKLRKTEEIAQERQRQLESMGISLEMSGIKVGDDKCYLVNLNADPALNELLVYYLKDHTRVGADTSQDIQLFGIGIQPQHCEIDIASDGDVTLTPKENARSCVNGTLVCSTTQLWHGDRILWGNNHFFRINLPKRKRRDWLKDFEKETGPPEHDLDAASEASSEPDYNYEFAQMEVIMKTLNSNDPVQNVVQVLEKQYLEEKRSALEEQRLMYERELEQLRQQLSPDRQPQSSGPDRLAYSSQTAQQKVTQWAEERDELFRQSLAKLREQLVKANTLVREANFLAEEMSKLTDYQVTLQIPAANLSANRKRGAIVSEPAIQVRRKGKSTQVWTIEKLENKLIDMRDLYQEWKEKVPEAKRLYGKRGDPFYEAQENHNLIGVANVFLECLFCDVKLQYAVPIISQQGEVAGRLHVEVMRVTGAVPERVVEDDSSENSSESGSLEVVDSSGEIIHRVKKLTCRVKIKEATGLPLNLSNFVFCQYTFWDQCESTVAAPVVDPEVPSPQSKDAQYTVTFSHCKDYVVNVTEEFLEFISDGALAIEVWGHRCAGNGSSIWEVDSLHAKTRTLHDRWNEVTRRIEMWISILELNELGEYAAVELHQAKDVNTGGIFQLRQGHSRRVQVTVKPVQHSGTLPLMVEAILSVSIGCVTARSTKLQRGLDSYQEEDLNCVRERWSDALIKRREYLDEQIKKVSNKTEKTEDDVEREAQLVEQWVGLTEERNAVLVPAPGSGIPGAPADWIPPPGMETHIPVLFLDLNADDLSANEQLVGPHASGVNSILPKEHGSQFFYLPIIKHSDDEVSATASWDSSVHDSVHLNRVTPQNERIYLIVKTTVQLSHPAAMELVLRKRIAANIYNKQSFTQSLKRRISLKNIFYSCGVTYEIVSNIPKATEEIEDRETLALLAARSENEGTSDGETYIEKYTRGVLQVENILSLERLRQAVTVKEALSTKARHIRRSLSTPNVHNVSSSRPDLSGFDEDDKGWPENQLDMSDYSSSYQDVACYGTLPRDSPRRNKEGCTSETPHALTVSPFKAFSPQPPKFFKPLMPVKEEHKKRIALEARPLLSQEDSEEEENELEAINRKLISSQPYVPVEFADFSVYNASLENREWFSSKVDLSNSRVLEKEVSRSPTTSSITSGYFSHSASNATLSDMVVPSSDSSDQLAIQTKDADSTEHSTPSLVHDFRPSSNKELTEVEKGLVKDKIIVVPLKENSALAKGSPSSQSIPEKNSKSLCRTGSCSELDACPSKISQPARGFCPREVTVEHTTNILEDHSFTEFMGVSEGKDFDGLTDSSAGELSSRRSLPNKTGGKTVSDGLHHPSQLHSKLENDQGGTTSR

SEQ ID NO: 15 - protein, 259 aa, Homo sapiens [sequence omitted]

SEQ ID NO: 16 - protein, 221 aa, Homo sapiens [sequence omitted]

SEQ ID NO: 17 - protein, 394 aa, Homo sapiens
MGKEIPTDAPWEAQHADKWDKMTMKELIDKICWTKTARRFAYLFVNINVTSEPHEVSALWFLWYVKQCGGTTRIFSVTNGGQERKFVGGSGQVSERIMDLLGDQVKLNHPVTHVDQSSDNIIIETLNHEHYECKYVINAIPPTLTAKIHFRPELPAERNQLIQRLPMGAVIKCMMYYKEAFWKKKDYCGCMIIEDEDAPISITLDDTKPDGSLPAIMGFILARKADRLAKLHKEIRKKKICELYAKVLGSQEALHPVHYEEKNWCEEQYSGGCYTAYFPPGIMTQYGRVIRQPVGRIFFAGTETATKWSGYMEGAVEAGERAAREVLNGLGKVTEKDIWVQEPESKDVPAVEITHTFWERNLPSVSGLLKIIGFSTSVTALGFVLYKYKLLPRS

SEQ ID NO: 18 - protein, 973 aa, Homo sapiens [sequence omitted]

SEQ ID NO: 19 - protein, 844 aa, Homo sapiens [sequence omitted]

SEQ ID NO: 20 - protein, 124 aa, Homo sapiens
MAARLLRGSLRVLGGHRAPRQLPAARCSHSGGEERLETPSAKKLTDIGIRRIFSPEHDIFRKSVRKFFQEEVIPHHSEWEKAGEVSREVWEKAGKQGLLGVNIAEHLGGIGGDLYSAAIVWEEQ

SEQ ID NO: 21 - protein, 502 aa, Homo sapiens
MQSEIAMDRMKKIKRQLSMTLRGGRGIDKTNGAPEQIGLDESGGGGGSDPGEAPTRAAPGELRSARGPLSSAPEIVHEDLKMGSDGESDQASATSSDEVQSPVRVRMRNHPPRKISTEDINKRLSLPADIRLPEGYLEKLTLNSPIFDKPLSRRLRRVSLSEIGFGKLETYIKLDKLGEGTYATVYKGKSKLTDNLVALKEIRLEHEEGAPCTAIREVSLLKDLKHANIVTLHDIIHTEKSLTLVFEYLDKDLKQYLDDCGNIINMHNVKLFLFQLLRGLAYCHRQKVLHRDLKPQNLLINERGELKLADFGLARAKSIPTKTYSNEVVTLWYRPPDILLGSTDYSTQIDMWGVGCIFYEMATGRPLFPGSTVEEQLHFIFRILGTPTEETWPGILSNEEFKTYNYPKYRAEALLSHAPRLDSDGADLLTKLLQFEGRNRISAEDAMKHPFFLSLGERIHKLPDTTSIFALKEIQLQKEASLRSSSMPDSGRPAFRVVDTEF

SEQ ID NO: 22 - protein, 701 aa, Homo sapiens
MAVSAGSARTSPSSGFLMVLDIPQERGLSSLDRKYLDGLDVCRFPLLDALRPLPLDWMYLVYTIMFLGALGMMLGLCYRISCVLFLLPYWYVFLLDKTSWNNHSYLYGLLAFQLTFMDANHYWSVDGLLNAHRRNAHVPLWNYAVLRGQIFIVYFIAGVKKLDADWVEGYSMEYLSRHWLFSPFKLLLSEELTSLLVVHWGGLLLDLSAGFLLFFDVSRSIGLFFVSYFHCMNSQLFSIGMFSYVMLASSPLFCSPEWPRKLVSYCPRRLQQLLPLKAAPQPSVSCVYKRSRGKSGQKPGLRHQLGAAFTLLYLLEQLFLPYSHFLTQGYNNWTNGLYGYSWDMMVHSRSHQHVKITYRDGRTGELGYLNPGVFTQSRRWKDHADMLKQYATCLSRLLPKYNVTEPQIYFDIWVSINDRFQQRIFDPRVDIVQAAWSPFQRTSWVQPLLMDLSPWRAKLQEIKSSLDNHTEVVFIADFPGLHLENFVSEDLGNTSIQLLQGEVTVELVAEQKNQTLREGEKMQLPAGEYHKVYTTSPSPSCYMYVYVNTTELALEQDLAYLQELKEKVENGSETGPLPPELQPLLEGEVKGGPEPTPLVQTFLRRQQRLQEIERRRNTPFHERFFRFLLRKLYVFRRSFLMTCISLRNLILGRPSLEQLAQEVTYANLRPFEAVGELNPSNTDSSHSNPPESNPDPVHSEF

SEQ ID NO: 23 - protein, 699 aa, Homo sapiens
MGPAPAGEQLRGATGEPEVMEPALEGTGKEGKKASSRKRTLAEPPAKGLLQPVKLSRAELYKEPTNEELNRLRETEILFHSSLLRLQVEELLKEVRLSEKKKDRIDAFLREVNQRVVRVPSVPETELTDQAWLPAGVRVPLHQVPYAVKGCFRFLPPAQVTVVGSYLLGTCIRPDINVDVALTMPREILQDKDGLNQRYFRKRALYLAHLAHHLAQDPLFGSVCFSYTNGCHLKPSLLLRPRGKDERLVTVRLHPCPPPDFFRPCRLLPTKNNVRSAWYRGQSPAGDGSPEPPTPRYNTWVLQDTVLESHLQLLSTILSSAQGLKDGVALLKVWLRQRELDKGQGGFTGFLVSMLVVFLVSTRKIHTTMSGYQVLRSVLQFLATTDLTVNGISLCLSSDPSLPALADFHQAFSVVFLDSSGHLNLCADVTASTYHQVQHEARLSMMLLDSRADDGFHLLLMTPKPMIRAFDHVLHLRPLSRLQAACHRLKLWPELQDNGGDYVSAALGPLTTLLEQGLGARLNLLAHSRPPVPEWDISQDPPKHKDSGTLTLGLLLRPEGLTSVLELGPEADQPEAAKFRQFWGSRSELRRFQDGAIREAVVWEAASMSQKRLIPHQVVTHLLALHADIPETCVHYVGGPLDALIQGLKEASSTKGRMVMSRGGELVMVPNVEAILEDFAVLGEGLVQTVEARSERWTV

SEQ ID NO: 24 - protein, 526 aa, Homo sapiens [sequence omitted]

SEQ ID NO: 25 - protein, 1006 aa, Homo sapiens
MAAAYLDPNLNHTPNSSTKTHLGTGMERSPGAMERVLKVFHYFESNSEPTTWASIIRHGDATDVRGIIQKIVDSHKVKHVACYGFRLSHLRSEEVHWLHVDMGVSSVREKYELAHPPEEWKYELRIRYLPKGFLNQFTEDKPTLNFFYQQVKSDYMLEIADQVDQEIALKLGCLEIRRSYWEMRGNALEKKSNYEVLEKDVGLKRFFPKSLLDSVKAKTLRKLIQQTFRQFANLNREESILKFFEILSPVYRFDKECFKCALGSSWIISVELAIGPEEGISYLTDKGCNPTHLADFTQVQTIQYSNSEDKDRKGMLQLKIAGAPEPLTVTAPSLTIAENMADLIDGYCRLVNGTSQSFIIRPQKEGERALPSIPKLANSEKQGMRTHAVSVSETDDYAEIIDEEDTYTMPSTRDYEIQRERIELGRCIGEGQFGDVHQGIYMSPENPALAVAIKTCKNCTSDSVREKFLQEALTMRQFDHPHIVKLIGVITENPVWIIMELCTLGELRSFLQVRKYSLDLASLILYAYQLSTALAYLESKRFVHRDIAARNVLVSSNDCVKLGDFGLSRYMEDSTYYKASKGKLPIKWMAPESINFRRFTSASDVWMFGVCMWEILMHGVKPFQGVKNNDVIGRIENGERLPMPPNCPPTLYSLMTKCWAYDPSRRPRFTELKAQLSTILEEEKAQQEERMRMESRRQATVSWDSGGSDEAPPKPSRPGYPSPRSSEGFYPSPQHMVQTNHYQDSTVLDLRGIGQVLPTHLMEERLIRQQQEMEEDQRWLEKEERFLKPDVRLSRGSIDREDGSLQGPIGNQHIYQPVGKPDPAAPPKKPPRPGAPGHLGSLASLSSPADSYNEGVKLQPQEISPPPTANLDRSNDKVYENVTGLVKAVIEMSSKIQPAPPEEYVPMVKEVGLALRTLLATVDETIPLLPASTHREIEMAQKLLNSDLGELINKMKLAQQYVMTSLQQEYKKQMLTAAHALAVDAKNLLDVIDQARLKMLGQTRPH

SEQ ID NO: 26 - protein, 921 aa, Homo sapiens
MRWGHHLPRASWGSGFRRALQRPDDRIPFLIHWSWPLQGERPFGPPRAFIRHHGSSVDSAPPPGRHGRLFPSASATEAIQRHRRNLAEWFSRLPREERQFGPTFALDTVHVDPVIRESTPDELLRPPAELALEHQPPQAGLPPLALSQLFNPDACGRRVQTVVLYGTVGTGKSTLVRKMVLDWCYGRLPAFELLIPFSCEDLSSLGPAPASLCQLVAQRYTPLKEVLPLMAAAGSHLLFVLHGLEHLNLDFRLAGTGLCSDPEEPQEPAAIIVNLLRKYMLPQASILVTTRPSAIGRIPSKYVGRYGEICGFSDTNLQKLYFQLRLNQPYCGYAVGGSGVSATPAQRDHLVQMLSRNLEGHHQIAAACFLPSYCWLVCATLHFLHAPTPAGQTLTSIYTSFLRLNFSGETLDSTDPSNLSLMAYAARTMGKLAYEGVSSRKTYFSEEDVCGCLEAGIRTEEEFQLLHIFRRDALRFFLAPCVEPGRAGTFVFTVPAMQEYLAALYIVLGLRKTTLQKVGKEVAELVGRVGEDVSLVLGIMAKLLPLRALPLLFNLIKVVPRVFGRMVGKSREAVAQAMVLEMFREEDYYNDDVLDQMGASILGVEGPRRHPDEPPEDEVFELFPMFMGGLLSAHNRAVLAQLGCPIKNLDALENAQAIKKKLGKLGRQVLPPSELLDHLFFHYEFQNQRFSAEVLSSLRQLNLAGVRMTPVKCTVVAAVLGSGRHALDEVNLASCQLDPAGLRTLLPVFLRARKLGLQLNSLGPEACKDLRDLLLHDQCQITTLRLSNNPLTAAGVAVLMEGLAGNTSVTHLSLLHTGLGDEGLELLAAQLDRNRQLQELNVAYNGAGDTAALALARAAREHPSLELLQGVAIQMCWKLPLLPYAHLWTPRMPSHWCFLLILMPPLPQWYDGLVAPRGRCT

SEQ ID NO: 27 - protein, 665 aa, Homo sapiens
MGESSEDIDQMFSTLLGEMDLLTQSLGVDTLPPPDPNPPRAEFNYSVGFKDLNESLNALEDQDLDALMADLVADISEAEQRTIQAQKESLQNQHHSASLQASIFSGAASLGYGTNVAATGISQYEDDLPPPPADPVLDLPLPPPPPEPLSQEEEEAQAKADKIKLALEKLKEAKVKKLVVKVHMNDNSTKSLMVDERQLARDVLDNLFEKTHCDCNVDWCLYEIYPELQIERFFEDHENVVEVLSDWTRDTENKILFLEKEEKYAVFKNPQNFYLDNRGKKESKETNEKMNAKNKESLLEESFCGTSIIVPELEGALYLKEDGKKSWKRRYFLLRASGIYYVPKGKTKTSRDLACFIQFENVNIYYGTQHKMKYKAPTDYCFVLKHPQIQKESQYIKYLCCDDTRTLNQWVMGIRIAKYGKTLYDNYQRAVAKAGLASRWTNLGTVNAAAPAQPSTGPKTGTTQPNGQIPQATHSVSAVLQEAQRHAETSKDKKPALGNHHDPAVPRAPHAPKSSLPPPPPVRRSSDTSGSPATPLKAKGTGGGGLPAPPDDFLPPPPPPPPLDDPELPPPPPDFMEPPPDFVPPPPPSYAGIAGSELPPPPPPPAPAPAPVPDSARPPPAVAKRPPVPPKRQENPGHPGGAGGGEQDFMSDLMKALQKKRGNVS

SEQ ID NO: 28 - protein, 495 aa, Homo sapiens
MDICESILERKRHDSERSTCSILEQTDMEAVEALVCMSSWGQRSQKGDLLRIRPLTPVSDSGDVTTTVHMDAATPELPKDFHSLSTLCITPPQSPDLVEPSTRTPVSPQVTDSKACTATDVLQSSAVVARALSGGAERGLLGLEPVPSSPCRAKGTSVIRHTGESPAACFPTIQTPDCRLSDSREGEEQLLGHFETLQDTHLTDSLLSTNLVSCQPCLHKSGGLLLTDKGQQAGWPGAVQTCSPKNYENDLPRKTTPLISVSVPAPPVLCQMIPVTGQSSMLPAFLKPPPQLSVGTVRPILAQAAPAPQPVFVGPAVPQGAVMLVLPQGALPPPAPCAANVMAAGNTKLLPLAPAPVFITSSQNCVPQVDFSRRRNYVCSFPGCRKTYFKSSHLKAHLRTHTGEKPFNCSWDGCDKKFARSDELSRHRRTHTGEKKFVCPVCDRRFMRSDHLTKHARRHMTTKKIPGWQAEVGKLNRIASAESPGSPLVSMPASA

SEQ ID NO: 29 - protein, 376 aa, Homo sapiens
MWYHRLSHLHSRLQDLLKGGVIYPALPQPNFKSLLPLAVHWHHTASKSLTCAWQQHEDHFELKYANTVMRFDYVWLRDHCRSASCYNSKTHQRSLDTASVDLCIKPKTIRLDETTLFFTWPDGHVTKYDLNWLVKNSYEGQKQKVIQPRILWNAEIYQQAQVPSVDCQSFLETNEGLKKFLQNFLLYGIAFVENVPPTQEHTEKLAERISLIRETIYGRMWYFTSDFSRGDTAYTKLALDRHTDTTYFQEPCGIQVFHCLKHEGTGGRTLLVDGFYAAEQVLQKAPEEFELLSKVPLKHEYIEDVGECHNHMIGIGPVLNIYPWNKELYLIRLFKEKQNTVNRQWNSSLQCDIPERILTYRHFVSGTSIEHRGSLI

SEQ ID NO: 30 - protein, 503 aa, Homo sapiens
MDLIPNFAMETWVLVATSLVLLYIYGTHSHGLFKKLGIPGPTPLPFLGNILSYHKGFCMFDMECHKKYGKVWGFYDGQQPVLAITDPDMIKTVLVKECYSVFTNRRPFGPVGFMKSAISIAEDEEWKRLRSLLSPTFTSGKLKEMVPIIAQYGDVLVRNLRREAETGKPVTLKDVFGAYSMDVITSTSFGVNIDSLNNPQDPFVENTKKLLRFDFLDPFFLSITVFPFLIPILEVLNICVFPREVTNFLRKSVKRMKESRLEDTQKHRVDFLQLMIDSQNSKETESHKALSDLELVAQSIIFIFAGYETTSSVLSFIMYELATHPDVQQKLQEEIDAVLPNKAPPTYDTVLQMEYLDMVVNETLRLFPIAMRLERVCKKDVEINGMFIPKGVVVMIPSYALHRDPKYWTEPEKFLPERFSKKNKDNIDPYIYTPFGSGPRNCIGMRFALMNMKLALIRVLQNFSFKPCKETQIPLKLSLGGLLQPEKPVVLKVESRDGTVSGA

SEQ ID NO: 31 - protein, 315 aa, Homo sapiens
MQRRSRGINTGLILLLSQIFHVGINNIPPVTLATLALNIWFFLNPQKPLYSSCLSVEKCYQQKDWQRLLLSPLHHADDWHLYFNMASMLWKGINLERRLGSRWFAYVITAFSVLTGVVYLLLQFAVAEFMDEPDFKRSCAVGFSGVLFALKVLNNHYCPGGFVNILGFPVPNRFACWVELVAIHLFSPGTSFAGHLAGILVGLMYTQGPLKKIMEACAGGFSSSVGYPGRQYYFNSSGSSGYQDYYPHGRPDHYEEAPRNYDTYTAGLSEEEQLERALQASLWDRGNTRNSPPPYGFHLSPEEMRRQRLHRFDSQ

SEQ ID NO: 32 - protein, 376 aa, Homo sapiens
MDGEEQQPPHEANVEPVVPSEASEPVPRVLSGDPQNLSDVDAFNLLLEMKLKRRRQRPNLPRTVTQLVAEDGSRVYVVGTAHFSDDSKRDVVKTIREVQPDVVVVELCQYRVSMLKMDESTLLREAQELSLEKLQQAVRQNGLMSGLMQMLLLKVSAHITEQLGMAPGGEFREAFKEASKVPFCKFHLGDRPIPVTFKRAIAALSFWQKVRLAWGLCFLSDPISKDDVERCKQKDLLEQMMAEMIGEFPDLHRTIVSERDVYLTYMLRQAARRLELPRASDAEPRKCVPSVVVGVVGMGHVPGIEKNWSTDLNIQEIMTVPPPSVSGRVSRLAVKAAFFGLLGYSLYWMGRRTASLVLSLPAAQYCLQRVTEARHK

SEQ ID NO: 33 - protein, 296 aa, Homo sapiens
MGKKSRVKTQKSGTGATATVSPKEILNLTSELLQKCSSPAPGPGKEWEEYVQIRTLVEKIRKKQKGLSVTFDGKREDYFPDLMKWASENGASVEGFEMVNFKEEGFGLRATRDIKAEELFLWVPRKLLMTVESAKNSVLGPLYSQDRILQAMGNIALAFHLLCERASPNSFWQPYIQTLPSEYDTPLYFEEDEVRYLQSTQAIHDVFSQYKNTARQYAYFYKVIQTHPHANKLPLKDSFTYEDYRWAVSSVMTRQNQIPTEDGSRVTLALIPLWDMCNHTNGLTPEDSFALAVASA

SEQ ID NO: 34 - protein, 508 aa, Homo sapiens
MDHLGASLWPQVGSLCLLLAGAAWAPPPNLPDPKFESKAALLAARGPEELLCFTERLEDLVCFWEEAASAGVGPGNYSFSYQLEDEPWKLCRLHQAPTARGAVRFWCSLPTADTSSFVPLELRVTAASGAPRYHRVIHINEVVLLDAPVGLVARLADESGHVVLRWLPPPETPMTSHIRYEVDVSAGNGAGSVQRVEILEGRTECVLSNLRGRTRYTFAVRARMAEPSFGGFWSAWSEPVSLLTPSDLDPLILTLSLILVVILVLLTVLALLSHRRALKQKIWPGIPSPESEFEGLFTTHKGNFQLWLYQNDGCLWWSPCTPFTEDPPASLEVLSERCWGTMQAVEPGTDDEGPLLEPVGSEHAQDTYLVLDKWLLPRNPPSEDLPGPGGSVDIVAMDEGSEASSCSSALASKPSPEGASAASFEYTILDPSSQLLRPWTLCPELPPTPPHLKYLYLVVSDSGISTDYSSGDSQGAQGGLSDGPYSNPYENSLIPAAEPLPPSYVACS

SEQ ID NO: 35 - protein, 351 aa, Homo sapiens
METNFSTPLNEYEEVSYESAGYTVLRILPLVVLGVTFVLGVLGNGLVIWVAGFRMTRTVTTICYLNLALADFSFTATLPFLIVSMAMGEKWPFGWFLCKLIHIVVDINLFGSVFLIGFIALDRCICVLHPVWAQNHRTVSLAMKVIVGPWILALVLTLPVFLFLTTVTIPNGDTYCTFNFASWGGTPEERLKVAITMLTARGIIRFVIGFSLPMSIVAICYGLIAAKIHKKGMIKSSRPLRVLTAVVASFFICWFPFQLVALLGTVWLKEMLFYGKYKIIDILVNPTSSLAFFNSCLNPMLYVFVGQDFRERLIHSLPTSLERALSEDSAPTNDTAANSASPPAETELQAM

SEQ ID NO: 36 - protein, 508 aa, Homo sapiens
MNCQQLWLGFLLPMTVSGRVLGLAEVAPVDYLSQYGYLQKPLEGSNNFKPEDITEALRAFQEASELPVSGQLDDATRARMRQPRCGLEDPFNQKTLKYLLLGRWRKKHLTFRILNLPSTLPPHTARAALRQAFQDWSNVAPLTFQEVQAGAADIRLSFHGRQSSYCSNTFDGPGRVLAHADIPELGSVHFDEDEFWTEGTYRGVNLRIIAAHEVGHALGLGHSRYSQALMAPVYEGYRPHFKLHPDDVAGIQALYGKKSPVIRDEEEEETELPTVPPVPTEPSPMPDPCSSELDAMMLGPRGKTYAFKGDYVWTVSDSGPGPLFRVSALWEGLPGNLDAAVYSPRTQWIHFFKGDKVWRYINFKMSPGFPKKLNRVEPNLDAALYWPLNQKVFLFKGSGYWQWDELARTDFSSYPKPIKGLFTGVPNQPSAAMSWQDGRVYFFKGKVYWRLNQQLRVEKGYPRNISHNWMHCRPRTIDTTPSGGNTTPSGTGITLDTTLSATETTFEY

SEQ ID NO: 37 - protein, 474 aa, Homo sapiens
MVQQTNNAENTEALLAGESSDSGAGLELGIASSPTPGSTASTGGKADDPSWCKTPSGHIKRPMNAFMVWSQIERRKIMEQSPDMHNAEISKRLGKRWKLLKDSDKIPFIREAERLRLKHMADYPDYKYRPRKKVKSGNANSSSSAAASSKPGEKGDKVGGSGGGGHGGGGGGGSSNAGGGGGGASGGGANSKPAQKKSCGSKVAGGAGGGVSKPHAKLILAGGGGGGKAAAAAAASFAAEQAGAAALLPLGAAADHHSLYKARTPSASASASSAASASAALAAPGKHLAEKKVKRVYLFGGLGTSSSPVGGVGAGADPSDPLGLYEEEGAGCSPDAPSLSGRSSAASSPAAGRSPADHRGYASLRAASPAPSSAPSHASSSASSHSSSSSSSGSSSSDDEFEDDLLDLNPSSNFESMSLGSFSSSSALDRDLDFNFEPGSGSHFEFPDYCTPEVSEMISGDWLESSISNLVFTY

SEQ ID NO: 38 - protein, 148 aa, Homo sapiens
MFRRPVLQVLRQFVRHESETTTSLVLERSLNRVHLLGRVGQDPVLRQVEGKNPVTIFSLATNEMWRSGDSEVYQLGDVSQKTTWHRISVFRPGLRDVAYQYVKKGSRIYLEGKIDYGEYMDKNNVRRQATTIIADNIIFLSDQTKEKE

SEQ ID NO: 39 - protein, 367 aa, Homo sapiens
EKTGLSIRGAQEEDPPDPQLMRLDNMLLAEGVSGPEKGGGSAAAAAAAAASGGSSDNSIEHSDYRAKLTQIRQIYHTELEKYEQACNEFTTHVMNLLREQSRTRPISPKEIERMVGIIHRKFSSIQMQLKQSTCEAVMILRSRFLDARRKRRNFSKQATEILNEYFYSHLSNPYPSEEAKEELAKKCSITVSQSLVKDPKERGSKGSDIQPTSVVSNWFGNKRIRYKKNIGKFQEEANLYAAKTAVTAAHAVAAAVQNNQTNSPTTPNSGSSGSFNLPNSGDMFMNMQSLNGDSYQGSQVGANVQSQVDTLRHVINQTGGYSDGLGGNSLYSPHNLNANGGWQDATTPSSVTSPTEGPGSVHSDTSN

SEQ ID NO: 40 - protein, 1342 aa, Homo sapiens
MRANDALQVLGLLFSLARGSEVGNSQAVCPGTLNGLSVTGDAENQYQTLYKLYERCEVVMGNLEIVLTGHNADLSFLQWIREVTGYVLVAMNEFSTLPLPNLRVVRGTQVYDGKFAIFVMLNYNTNSSHALRQLRLTQLTEILSGGVYIEKNDKLCHMDTIDWRDIVRDRDAEIVVKDNGRSCPPCHEVCKGRCWGPGSEDCQTLTKTICAPQCNGHCFGPNPNQCCHDECAGGCSGPQDTDCFACRHFNDSGACVPRCPQPLVYNKLTFQLEPNPHTKYQYGGVCVASCPHNFVVDQTSCVRACPPDKMEVDKNGLKMCEPCGGLCPKACEGTGSGSRFQTVDSSNIDGFVNCTKILGNLDFLITGLNGDPWHKIPALDPEKLNVFRTVREITGYLNIQSWPPHMHNFSVFSNLTTIGGRSLYNRGFSLLIMKNLNVTSLGFRSLKEISAGRIYISANRQLCYHHSLNWTKVLRGPTEERLDIKHNRPRRDCVAEGKVCDPLCSSGGCWGPGPGQCLSCRNYSRGGVCVTHCNFLNGEPREFAHEAECFSCHPECQPMEGTATCNGSGSDTCAQCAHFRDGPHCVSSCPHGVLGAKGPIYKYPDVQNECRPCHENCTQGCKGPELQDCLGQTLVLIGKTHLTMALTVIAGLVVIFMMLGGTFLYWRGRRIQNKRAMRRYLERGESIEPLDPSEKANKVLARIFKETELRKLKVLGSGVFGTVHKGVWIPEGESIKIPVCIKVIEDKSGRQSFQAVTDHMLAIGSLDHAHIVRLLGLCPGSSLQLVTQYLPLGSLLDHVRQHRGALGPQLLLNWGVQIAKGMYYLEEHGMVHRNLAARNVLLKSPSQVQVADFGVADLLPPDDKQLLYSEAKTPIKWMALESIHFGKYTHQSDVWSYGVTVWELMTFGAEPYAGLRLAEVPDLLEKGERLAQPQICTIDVYMVMVKCWMIDENIRPTFKELANEFTRMARDPPRYLVIKRESGPGIAPGPEPHGLTNKKLEEVELEPELDLDLDLEAEEDNLATTTLGSALSLPVGTLNRPRGSQSLLSPSSGYMPMNQGNLGESCQESAVSGSSERCPRPVSLHPMPRGCLASESSEGHVTGSEAELQEKVSMCRSRSRSRSPRPRGDSAYHSQRHSLLTPVTPLSPPGLEEEDVNGYVMPDTHLKGTPSSREGTLSSVGLSSVLGTEEEDEDEEYEYMNRRRRHSPPHPPRPSSLEELGYEYMDVGSDLSASLGSTQSCPLHPVPIMPTAGTTPDEDYEYMNRQRDGGGPGGDYAAMGACPASEQGYEEMRAFQGPGHQAPHVHYARLKTLRSLEATDSAFDNPDYWHSRLFPKANAQRT

SEQ ID NO: 41 - protein, 561 aa, Homo sapiens [sequence omitted]

SEQ ID NO: 42 - protein, 152 aa, Homo sapiens
RPSGRKSSKMQAFRIWDVNQKTFYLRNNQLVAGYLQGPNVNLEEKIDVVPIEPHALFLGIHGGKMCLSCVKSGDETRLQLEAVNITDLSENRKQDKRFAFIRSDSGPTTSFESAACPGWFLCTAMEADQPVSLTNMPDEGVMVTKFYFQEDE

SEQ ID NO: 43 - protein, 298 aa, Homo sapiens
MWGACKVKVHDSLATISITLRRYLRLGATMAKSKFEYVRDFEADDTCLAHCWVVVRLDGRNFHRFAEKHNFAKPNDSRALQLMTKCAQTVMEELEDIVIAYGQSDEYSFVFKRKTNWFKRRASKFMTHVASQFASSYVFYWRDYFEDQPLLYPPGFDGRVVVYPSNQTLKDYLSWRQADCHINNLYNTVFWALIQQSGLTPVQAQGRLQGTLAADKNEILFSEFNINYNNEPPMYRKGTVLIWQKVDEVMTKEIKLPTEMEGKKMAVTRTRTKPVPLHCDIIGDAFWKEHPEILDEDS

SEQ ID NO: 44 - protein, 545 aa, Homo sapiens
MLLLHRAVVLRLQQACRLKSIPSRICIQACSTNDSFQPQRPSLTFSGDNSSTQGWRVMGTLLGLGAVLAYQDHRCRAAQESTHIYTKEEVSSHTSPETGIWVTLGSEVFDVTEFVDLHPGGPSKLMLAAGGPLEPFWALYAVHNQSHVRELLAQYKIGELNPEDKVAPTVETSDPYADDPVRHPALKVNSQRPFNAEPPPELLTENYITPNPIFFTRNHLPVPNLDPDTYRLHVVGAPGGQSLSLSLDDLHNFPRYEITVTLQCAGNRRSEMTQVKEVKGLEWRTGAISTARWAGARLCDVLAQAGHQLCETEAHVCFEGLDSDPTGTAYGASIPLARAMDPEAEVLLAYEMNGQPLPRDHGFPVRVVVPGVVGARHVKWLGRVSVQPEESYSHWQRRDYKGFSPSVDWETVDFDSAPSIQELPVQSAITEPRDGETVESGEVTIKGYAWSGGGRAVIRVDVSLDGGLTWQVAKLDGEEQRPRKAWAWRLWQLKAPVPAGQKELNIVCKAVDDGYNVQPDTVAPIWNLRGVLSNAWHRVHVYVSP

SEQ ID NO: 45 - protein, 775 aa, Homo sapiens [sequence omitted]

SEQ ID NO: 46 - protein, 453 aa, Homo sapiens
MGRTREAGCVAAGVVIGAGACYCVYRLAWGRDENEKIWDEDEESTDTSEIGVETVKGAKTNAGAGSGAKLQGDSEVKPEVSLGLEDCPGVKEKAHSGSHSGGGLEAKAKALFNTLKEQASAKAGKGARVGTISGNRTLAPSLPCPGGRGGGCHPTRSGSRAGGRASGKSKGKARSKSTRAPATTWPVRRGKFNFPYKIDDILSAPDLQKVLNILERTNDPFIQEVALVTLGNNAAYSFNQNAIRELGGVPIIAKLIKTKDPIIREKTYNALNNLSVNAENQGKIKTYISQVCDDTMVCRLDSAVQMAGLRLLTNMTVTNHYQHLLSYSFPDFFALLFLGNHFTKIQIMKLIINFTENPAMTRELVSCKVPSELISLFNKEWDREILLNILTLFENINDNIKNEGLASSRKEFSRSSLFFLFKESGVCVKKIKALANHNDLVVKVKVLKVLTKL

SEQ ID NO: 47 - protein, 338 aa, Homo sapiens
MELRSGSVGSQAVARRMDGDSRDGGGGKDATGSEDYENLPTSASVSTHMTAGAMAGILEHSVMYPVDSVKTRMQSLSPDPKAQYTSIYGALKKIMRTEGFWRPLRGVNVMIMGAGPAHAMYFACYENMKRTLNDVFHHQGNSHLANGIAGSMATLLHDAVMNPAEVVKQRLQMYNSQHRSAISCIRTVWRTEGLGAFYRSYTTQLTMNIPFQSIHFITYEFLQEQVNPHRTYNPQSHIISGGLAGALAAAATTPLDVCKTLLNTQENVALSLANISGRLSGMANAFRTVYQLNGLAGYFKGIQARVIYQMPSTAISWSVYEFFKYFLTKRQLENRAPY

SEQ ID NO: 48 - protein, 395 aa, Homo sapiens
MDFNMKKLASDAGIFFTRAVQFTEEKFGQAEKTELDAHFENLLARADSTKNWTEKILRQTEVLLQPNPSARVEEFLYEKLDRKVPSRVTNGELLAQYMADAASELGPTTPYGKTLIKVAEAEKQLGAAERDFIHTASISFLTPLRNFLEGDWKTISKERRLLQNRRLDLDACKARLKKAKAAEAKATTVPDFQETRPRNYILSASASALWNDEVDKAEQELRVAQTEFDRQAEVTRLLLEGISSTHVNHLRCLHEFVKSQTTYYAQCYRHMLDLQKQLGRFPGTFVGTTEPASPPLSSTSPTTAAATMPVVPSVASLAPPGEASLCLEEVAPPASGTRKARVLYDYEAADSSELALLADELITVYSLPGMDPDWLIGERGNKKGKVPVTYLELLS

SEQ ID NO: 49 - protein, 460 aa, Homo sapiens
MNFSEVFKLSSLLCKFSPDGKYLASCVQYRLVVRDVNTLQILQLYTCLDQIQHIEWSADSLFILCAMYKRGLVQVWSLEQPEWHCKIDEGSAGLVASCWSPDGRHILNTTEFHLRITVWSLCTKSVSYIKYPKACLQGITFTRDGRYMALAERRDCKDYVSIFVCSDWQLLRHFDTDTQDLTGIEWAPNGCVLAVWDTCLEYKILLYSLDGRLLSTYSAYEWSLGIKSVAWSPSSQFLAVGSYDGKVRILNHVTWKMITEFGHPAAINDPKIVVYKEAEKSPQLGLGCLSFPPPRAGAGPLPSSESKYEIASVPVSLQTLKPVTDRANPKIGIGMLAFSPDSYFLATRNDNIPNAVWVWDIQKLRLFAVLEQLSPVRAFQWDPQQPRLAICTGGSRLYLWSPAGCMSVQVPGEGDFAVLSLCWHLSGDSMALLSKDHFCLCFLETEAVVGTACRQLGGHT

SEQ ID NO: 50 - protein, 146 aa, Homo sapiens [sequence omitted]

SEQ ID NO: 51 - protein, 299 aa, Homo sapiens
MMLIPTHHFRNIERKPEYLQPEKCVPPPYPGPVGTMWFIRDGCGIACAIVTWFLVLYAEFVVLFVMLIPSRDYVYSIINGIVFNLLAFLALASHCRAMLTDPGAVPKGNATKEFIESLQLKPGQVVYKCPKCCSIKPDRAHHCSVCKRCIRKMDHHCPWVNNCVGENNQKYFVLFTMYIALISLHALIMVGFHFLHCFEEDWTKCSSFSPPTTVILLILLCFEGLLFLIFTSVMFGTQVHSICTDETGIEQLKKEERRWAKKTKWMNMKAVFGHPFSLGWASPFATPDQGKADPYQYVV

SEQ ID NO: 52 - protein, 250 aa, Homo sapiens
MSVIFFACVVRVRDGLPLSASTDFYHTQDFLEWRRRLKSLALRLAQYPGRGSAEGCDFSIHFSSFGDVACMAICSCQCPAAMAFCFLETLWWEFTASYDTTCIGLASRPYAFLEFDSIIQKVKWHFNYVSSSQMECSLEKIQEELKLQPPAVLTLEDTDVANGVMNGHTPMHLEPAPNFRMEPVTALGILSLILNIMCAALNLIRGVHLAEHSLQVAHEEIGNILAFLVPFVACIFQDPRSWFCWLDQTS

SEQ ID NO: 53 - protein, 453 aa, Homo sapiens
MRIPVDASTSRRFTPPSTALSPGKMSEALPLGAPDAGAALAGKLRSGDRSMVEVLADHPGELVRTDSPNFLCSVLPTHWRCNKTLPIAFKVVALGDVPDGTLVTVMAGNDENYSAELRNATAAMKNQVARFNDLRFVGRSGRGKSFTLTITVFTNPPQVATYHRAIKITVDGPREPRRHRQKLDDQTKPGSLSFSERLSELEQLRRTAMRVSPHHPAPTPNPRASLNHSTAFNPQPQSQMQDTRQIQPSPPWSYDQSYQYLGSIASPSVHPATPISPGRASGMTTLSAELSSRLSTAPDLTAFSDPRQFPALPSISDPRMHYPGAFTYSPTPVTSGIGIGMSAMGSATRYHTYLPPPYPGSSQAQGGPFQASSPSYHLYYGASAGSYQFSMVGGERSPPRILPPCTNASTGSALLNPSLPNQSDVVEAEGSHSNSPTNMAPSARLEEAVWRPY

SEQ ID NO: 54 - protein, 1283 aa, Homo sapiens
MWGSDRLAGAGGGGAAVTVAFTNARDCFLHLPRRLVAQLHLLQNQAIEVVWSHQPAFLSWVEGRHFSDQGENVAEINRQVGQKLGLSNGGQVFLKPCSHVVSCQQVEVEPLSADDWEILELHAVSLEQHLLDQIRIVFPKAIFPVWVDQQTYIFIQIVALIPAASYGRLETDTKLLIQPKTRRAKENTFSKADAEYKKLHSYGRDQKGMMKELQTKQLQSNTVGITESNENESEIPVDSSSVASLWTMIGSIFSFQSEKKQETSWGLTEINAFKNMQSKVVPLDNIFRVCKSQPPSIYNASATSVFHKHCAIHVFPWDQEYFDVEPSFTVTYGKLVKLLSPKQQQSKTKQNVLSPEKEKQMSEPLDQKKIRSDHNEEDEKACVLQVVWNGLEELNNAIKYTKNVEVLHLGKVWIPDDLRKRLNIEMHAVVRITPVEVTPKIPRSLKLQPRENLPKDISEEDIKTVFYSWLQQSTTTMLPLVISEEEFIKLETKDGLKEFSLSIVHSWEKEKDKNIFLLSPNLLQKTTIQVLLDPMVKEENSEEIDFILPFLKLSSLGGVNSLGVSSLEHITHSLLGRPLSRQLMSLVAGLRNGALLLTGGKGSGKSTLAKAICKEAFDKLDAHVERVDCKALRGKRLENIQKTLEVAFSEAVWMQPSVVLLDDLDLIAGLPAVPEHEHSPDAVQSQRLAHALNDMIKEFISMGSLVALIATSQSQQSLHPLLVSAQGVHIFQCVQHIQPPNQEQRCEILCNVIKNKLDCDINKFTDLDLQHVAKETGGFVARDFTVLVDRAIHSRLSRQSISTREKLVLTTLDFQKALRGFLPASLRSVNLHKPRDLGWDKIGGLHEVRQILMDTIQLPAKYPELFANLPIRQRTGILLYGPPGTGKTLLAGVIARESRMNFISVKGPELLSKYIGASEQAVRDIFIRAQAAKPCILFFDEFESIAPRRGHDNTGVTDRVVNQLLTQLDGVEGLQGVYVLAATSRPDLIDPALLRPGRLDKCVYCPPPDQVSRLEILNVLSDSLPLADDVDLQHVASVTDSFTGADLKALLYNAQLEALHGMLLSSGLQDGSSSSDSDLSLSSMVFLNHSSGSDDSAGDGECGLDQSLVSLEMSEILPDESKFNMYRLYFGSSYESELGNGTSSDLSSQCLSAPSSMTQDLPGVPGKDQLFSQPPVLRTASQEGCQELTQEQRDQLRADISIIKGRYRSQSGEDESMNQPGPIKTRLAISQSHLMTALGHTRPSISEDDWKNFAELYESFQNPKRRKNQSGTMFRPGQKVTLA

SEQ ID NO: 55 - protein, 148 aa, Homo sapiens; identical to SEQ ID NO: 38

SEQ ID NO: 56 - protein, 1476 aa, Homo sapiens
MTSSSPAGLEGSDLSSINTMMSAVMSVGKVTENGGSPQGIKSPSKPPGPNRIGRRNQETKEEKSSYNCPLCEKICTTQHQLTMHIRQHNTDTGGADHSCSICGKSLSSASSLDRHMLVHSGERPYKCTVCGQSFTTNGNMHRHMKIHEKDPNSATATAPPSPLKRRRLSSKRKLSHDAESEREDPAPAKKMVEDGQSGDLEKKADEVFHCPVCFKEFVCKYGLETHMETHSDNPLRCDICCVTFRTHRGLLRHNALVHKQLPRDAMGRPFIQNNPSIPAGFHDLGFTDFSCRKFPRISQAWCETNLRRCISEQHRFVCDTCDKAFPMLCSLALHKQTHVAADQGQEKPQATPLPGDALDQKGFLALLGLQHTKDVRPAPAEEPLPDDNQAIQLQTLKCQLPQDPGCTNLLSLSPFEAASLGGSLTVLPATKDSIKHLSLQPFQKGFIIQPDSSIVVKPISGESAIELADIQQILKMAASAPPQISLPPFSKAPAAPLQAIFKHMPPLKPKPLVTPRTVVATSTPPPLINAQQASPGCISPSLPPPPLKLLKGSVEAASNAHLLQSKSGTQPHAATRLSLQQPRAELPGQPEMKTQLEQDSIIEALLPLSMEAKIKQEITEGELKAFMTAPGGKKTPAMRKVLYPCRFCNQVFAFSGVLRAHVRSHLGISPYQCNICDYIAADKAALIRHLRTHSGERPYICKICHYPFTVKANCERHLRKKHLKATRKDIEKNIEYVSSSAAELVDAFCAPDTVCRLCGEDLKHYRALRIHMRTHCGRGLGGGHKGRKPFECKECSAAFAAKRNCIHHILKQHLHVPEQDIESYVLAADGLGPAEAPAAEASGRGEDSGCAALGDCKPLTAFLEPQNGFLHRGPTQPPPPHVSIKLEPASSFAVDFNEPLDFSQKGLALVQVKQENISFLSPSSLVPYDCSMEPIDLSIPKNFRKGDKDLATPSEAKKPEEEAGSSEQPSPCPAPGPSLPVTLGPSGILESPMAPAPAATPEPPAQPLQGPVQLAVPIYSSALVSSPPLVGSSALLSGTALLRPLRPKPPLLLPKPPVTEELPPLASIAQIISSVSSAPTLLKTKVADPGPASTGSNTTASDSLGGSVPKAATTATPAATTSPKESSEPPAPASSPEAASPTEQGPAGTSKKRGRKRGMRSRPRANSGGVDLDSSGEFASIEKMLATTDTNKFSPFLQTAEDNTQDEVAGAPADHHGPSDEEQGSPPEDKLLRAKRNSYTNCLQKITCPHCPRVFPWASSLQRHMLTHTGQKPFPCQKCDAFFSTKSNCERHQLRKHGVTTCSLRRNGLIPQSKESDVGSHDSTGERPYKCQTCERTFTLKHSLVRHQRIHQKARHAKHHGKDSDKEERGEEDSENESTHSGNNAVSENEAELAPNASNHMAVTRSRKEGLASATKDCSHREEKVTAGWPSEPGQGDLNPESPAALGQDLLEPRSKRPAHPILATADGASQLVGME

SEQ ID NO: 57 - protein, 1749 aa, Homo sapiens; identical to SEQ ID NO: 14

SEQ ID NO: 58 - protein, 303 aa, Homo sapiens
MGSAGRLHYLAMTAENPTPGDLAPAPLITCKLCLCEQSLDKMTTLQECQCIFCTACLKQYMQLAIREGCGSPITCPDMVCLNHGTLQEAEIACLVPVDQFQLYQRLKFEREVHLDPYRTWCPVADCQTVCPVASSDPGQPVLVECPSCHLKFCSCCKDAWHAEVSCRDSQPIVLPTEHRALFGTDAEAPIKQCPVCRVYIERNEGCAQMMCKNCKHTFCWYCLQNLDNDIFLRHYDKGPCRNKLGHSRASVMWNRTQVVGILVGLGIIALVTSPLLLLASPCIICCVCKSCRGKKKKHDPSTT

SEQ ID NO: 59 - protein, 724 aa, Homo sapiens
MPEEVHHGEEEVETFAFQAEIAQLMSLIINTFYSNKEIFLRELISNASDALDKIRYESLTDPSKLDSGKELKIDIIPNPQERTLTLVDTGIGMTKADLINNLGTIAKSGTKAFMEALQAGADISMIGQFGVGFYSAYLVAEKVVVITKHNDDEQYAWESSAGGSFTVRADHGEPIGRGTKVILHLKEDQTEYLEERRVKEVVKKHSQFIGYPITLYLEKEREKEISDDEAEEEKGEKEEEDKDDEEKPKIEDVGSDEEDDSGKDKKKKTKKIKEKYIDQEELNKTKPIWTRNPDDITQEEYGEFYKSLTNDWEDHLAVKHFSVEGQLEFRALLFIPRRAPFDLFENKKKKNNIKLYVRRVFIMDSCDELIPEYLNFIRGVVDSEDLPLNISREMLQQSKILKVIRKNIVKKCLELFSELAEDKENYKKFYEAFSKNLKLGIHEDSTNRRRLSELLRYHTSQSGDEMTSLSEYVSRMKETQKSIYYITGESKEQVANSAFVERVRKRGFEVVYMTEPIDEYCVQQLKEFDGKSLVSVTKEGLELPEDEEEKKKMEESKAKFENLCKLMKEILDKKVEKVTISNRLVSSPCCIVTSTYGWTANMERIMKAQALRDNSTMGYMMAKKHLEINPDHPIVETLRQKAEADKNDKAVKDLVVLLFETALLSSGFSLEDPQTHSNRIYRMIKLGLGIDEDEVAAEEPNAAVPDEIPPLEGDEDASRMEEVD

SEQ ID NO: 60 - protein, 214 aa, Homo sapiens
MSNYSVSLVGPAPWGFRLQGGKDFNMPLTISSLKDGGKAAQANVRIGDVVLSIDGINAQGMTHLEAQNKIKGCTGSLNMTLQRASAAPKPEPVPVQKKTQVTNNPGTVKIPPKRPPRKHIVERYTEFYHVPTHSDASKKRLIEDTEDWRPRTGTTQSRSFRILAQITGTEHLKESEADNTKKAKEKIPLHVFSPKYTKLRDWHHEVSARALNVQ

SEQ ID NO: 61 - protein, 497 aa, Homo sapiens
MKFLLTTAFLILISLWVEEAYSKEKSSKKGKGKKKQYLCPSQQSAEDLARVPANSTSNILNRLLVSYDPRIRPNFKGIPVDVVVNIFINSFGSIQETTMDYRVNIFLRQKWNDPRLKLPSDFRGSDALTVDPTMYKCLWKPDLFFANEKSANFHDVTQENILLFIFRDGDVLVSMRLSITLSCPLDLTLFPMDTQRCKMQLESFGYTTDDLRFIWQSGDPVQLEKIALPQFDIKKEDIEYGNCTKYYKGTGYYTCVEVIFTLRRQVGFYMMGVYAPTLLIVVLSWLSFWINPDASAARVPLGIFSVLSLASECTTLAAELPKVSYVKALDVWLIACLLFGFASLVEYAVVQVMLNNPKRVEAEKARIAKAEQADGKGGNVAKKNTVNGTGTPVHISTLQVGETRCKKVCTSKSDLRSNDFSIVGSLPRDFELSNYDCYGKPIEVNNGLGKSQAKNNKKPPPAKPVIPTAAKRIDLYARALFPFCFLFFNVIYWSIYL

SEQ ID NO: 62 - protein, 714 aa, Homo sapiens
MASEAPSPPRSPPPPTSPEPELAQLRRKVEKLERELRSCKRQVREIEKLLHHTERLYQNAESNNQELRTQVEELSKILQRGRNEDNKKSDVEVQTENHAPWSISDYFYQTYYNDVSLPNKVTELSDQQDQAIETSILNSKDHLQVENDAYPGTDRTENVKYRQVDHFASNSQEPASALATEDTSLEGSSLAESLRAAAEAAVSQTGFSYDENTGLYFDHSTGFYYDSENQLYYDPSTGIYYYCDVESGRYQFHSRVDLQPYPTSSTKQSKDKKLKKKRKDPDSSATNEEKDLNSEDQKAFSVEHTSCNEEENFANMKKKAKIGIHHKNSPPKVTVPTSGNTIESPLHENISNSTSFKDEKIMETDSEPEEGEITDSQTEDSYDEAITSEGNVTAEDSEDEDEDKIWPPCIRVIVIRSPVLQIGSLFIITAVNPATIGREKDMEHTLRIPEVGVSKFHAEIYFDHDLQSYVLVDQGSQNGTIVNGKQILQPKTKCDPYVLEHGDEVKIGETVLSFHIHPGSDTCDGCEPGQVRAHLRLDKKDESFVGPTLSKEEKELERRKELKKIRVKYGLQNTEYEDEKTLKNPKYKDRAGKRREQVGSEGTFQRDDAPASVHSEITDSNKGRKMLEKMGWKKGEGLGKDGGGMKTPIQLQLRRTHAGLGTGKPSSFEDVHLLQNKNKKNWDKARERFTENFPETKPQKDDPGTMPWVKGTLE

SEQ ID NO: 63 - protein, 339 aa, Homo sapiens
MNWELLLWLLVLCALLLLLVQLLRFLRADGDLTLLWAEWQGRRPEWELTDMVVWVTGASSGIGEELAYQLSKLGVSLVLSARRVHELERVKRRCLENGNLKEKDILVLPLDLTDTGSHEAATKAVLQEFGRIDILVNNGGMSQRSLCMDTSLDVYRKLIELNYLGTVSLTKCVLPHMIERKQGKIVTVNSILGIISVPLSIGYCASKHALRGFFNGLRTELATYPGIIVSNICPGPVQSNIVENSLAGEVTKTIGNNGDQSHKMTTSRCVRLMLISMANDLKEVWISEQPFLLVTYLWQYMPTWAWWITNKMGKKRIENFKSGVDADSSYFKIFKTKHD

SEQ ID NO: 64 - protein, 640 aa, Homo sapiens
MSERKEGRGKGKGKKKERGSGKKPESAAGSQSPALPPRLKEMKSQESAAGSKLVLRCETSSEYSSLRFKWFKNGNELNRKNKPQNIKIQKKPGKSELRINKASLADSGEYMCKVISKLGNDSASANITIVESNEIITGMPASTEGAYVSSESPIRISVSTEGANTSSSTSTSTTGTSHLVKCAEKEKTFCVNGGECFMVKDLSNPSRYLCKCQPGFTGARCTENVPMKVQNQEKAEELYQKRVLTITGICIALLVVGIMCVVAYCKTKKQRKKLHDRLRQSLRSERNNMMNIANGPHHPNPPPENVQLVNQYVSKNVISSEHIVEREAETSFSTSHYTSTAHHSTTVTQTPSHSWSNGHTESILSESHSVIVMSSVENSRHSSPTGGPRGRLNGTGGPRECNSFLRHARETPDSYRDSPHSERYVSAMTTPARMSPVDFHTPSSPKSPPSEMSPPVSSMTVSMPSMAVSPFMEEERPLLLVTPPRLREKKFDHHPQQFSSFHHNPAHDSNSLPASPLRIVEDEEYETTQEYEPAQEPVKKLANSRRAKRTKPNGHIANRLEVDSNTSSQSSNSESETEDERVGEDTPFLGIQNPLAASLEATPAFRLADSRTNPAGRFSTQEEIQARLSSVIANQDPIAV

SEQ ID NO: 65 - protein, 1074 aa, Homo sapiens
MISADCNLCLPEYDRYLASSKIMAAAYLDPNLNHTPNSSTKTHLGTGMERSPGAMERVLKVFHYFESNSEPTTWASIIRHGDATDVRGIIQKIVDSHKVKHVACYGFRLSHLRSEEVHWLHVDMGVSSVREKYELAHPPEEWKYELRIRYLPKGFLNQFTEDKPTLNFFYQQVKSDYMLEIADQVDQEIALKLGCLEIRRSYWEMRGNALEKKSNYEVLEKDVGLKRFFPKSLLDSVKAKTLRKLIQQTFRQFANLNREESILKFFEILSPVYRFDKECFKCALGSSWIISVELAIGPEEGISYLTDKGCNPTHLADFTQVQTIQYSNSEDKDRKGMLQLKIAGAPEPLTVTAPSLTIAENMADLIDGYCRLVNGTSQSFIIRPQKEGERALPSIPKLANSEKQGMRTHAVSVSETDDYAEIIDEEDTYTMPSTRDYEIQRERIELGRCIGEGQFGDVHQGIYMSPENPALAVAIKTCKNCTSDSVREKFLQEALTMRQFDHPHIVKLIGVITENPVWIIMELCTLGELRSFLQVRKYSLDLASLILYAYQLSTALAYLESKRFVHRDIAARNVLVSSNDCVKLGDFGLSRYMEDSTYYKASKGKLPIKWMAPESINFRRFTSASDVWMFGVCMWEILMHGVKPFQGVKNNDVIGRIENGERLPMPPNCPPTLYSLMTKCWAYDPSRRPRFTELKAQLSTILEEEKAQQEERMRMESRRQATVSWDSGGSDEAPPKPSRPGYPSPRSSEGFYPSPQHMVQTNHYQVSGYPGSHGITAMAGSIYPGQASLLDQTDSWNHRPQEIAMWQPNVEDSTVLDLRGIGQVLPTHLMEERLIRQQQEMEEDQRWLEKEERFLKPDVRLSRGSIDREDGSLQGPIGNQHIYQPVGKPDPAAPPKKPPRPGAPGHLGSLASLSSPADSYNEGVKLQPQEISPPPTANLDRSNDKVYENVTGLVKAVIEMSSKIQPAPPEEYVPMVKEVGLALRTLLATVDETIPLLPASTHREIEMAQKLLNSDLGELINKMKLAQQYVMTSLQQEYKKQMLTAAHALAVDAKNLLDVIDQARLKMLGQTRPH

SEQ ID NO: 66 - protein, 61 aa, Homo sapiens
MDPNCSCAAGDSCTCAGSCKCKECKCTSCKKSCCSCCPVGCAKCAQGCICKGASDKCSCCA

SEQ ID NO: 67 - protein, 359 aa, Homo sapiens
MKPALFSVLCEIKEKTGLSIRGAQEEDPPDPQLMRLDNMLLAEGVSGPEKGGGSAAAAAAAAASGGSSDNSIEHSDYRAKLTQIRQIYHTELEKYEQACNEFTTHVMNLLREQSRTRPISPKEIERMVGIIHRKFSSIQMQLKQSTCEAVMILRSRFLDARRKRRNFSKQATEILNEYFYSHLSNPYPSEEAKEELAKKCSITVSQVSNWFGNKRIRYKKNIGKFQEEANLYAAKTAVTAAHAVAAAVQNNQTNSPTTPNSGSSGSFNLPNSGDMFMNMQSLNGDSYQGSQVGANVQSQVDTLRHVINQTGGYSDGLGGNSLYSPHNLNANGGWQDATTPSSVTSPTEGPGSVHSDTSN

SEQ ID NO: 68 - protein, 99 aa, Homo sapiens
MQPRVLLVVALLALLASARASEAEDASLLSFMQGYMKHATKTAKDALSSVQESQVAQQARGWVTDGFSSLKDYWSTVKDKFSEFWDLDPEVRPTSAVAA

SEQ ID NO: 69 - protein, 415 aa, Homo sapiens
MTGERPSTALPDRRWGPRILGFWGGCRVWVFAAIFLLLSLAASWSKAENDFGLVQPLVTMEQLLWVSGRQIGSVDTFRIPLITATPRGTLLAFAEARKMSSSDEGAKFIALRRSMDQGSTWSPTAFIVNDGDVPDGLNLGAVVSDVETGVVFLFYSLCAHKAGCQVASTMLVWSKDDGVSWSTPRNLSLDIGTEVFAPGPGSGIQKQREPRKGRLIVCGHGTLERDGVFCLLSDDHGASWRYGSGVSGIPYGQPKQENDFNPDECQPYELPDGSVVINARNQNNYHCHCRIVLRSYDACDTLRPRDVTFDPELVDPVVAAGAVVTSSGIVFFSNPAHPEFRVNLTLRWSFSNGTSWRKETVQLWPGPSGYSSLATLEGSMDGEEQAPQLYVLYEKGRNHYTESISVAKISVYGTL

SEQ ID NO: 70 - protein, 499 aa, Homo sapiens
MAMAEGERTECAEPPRDEPPADGALKRAEELKTQANDYFKAKDYENAIKFYSQAIELNPSNAIYYGNRSLAYLRTECYGYALGDATRAIELDKKYIKGYYRRAASNMALGKFRAALRDYETVVKVKPHDKDAKMKYQECNKIVKQKAFERAIAGDEHKRSVVDSLDIESMTIEDEYSGPKLEDGKVTISFMKELMQWYKDQKKLHRKCAYQILVQVKEVLSKLSTLVETTLKETEKITVCGDTHGQFYDLLNIFELNGLPSETNPYIFNGDFVDRGSFSVEVILTLFGFKLLYPDHFHLLRGNHETDNMNQIYGFEGEVKAKYTAQMYELFSEVFEWLPLAQCINGKVLIMHGGLFSEDGVTLDDIRKIERNRQPPDSGPMCDLLWSDPQPQNGRSISKRGVSCQFGPDVTKAFLEENNLDYIIRSHEVKAEGYEVAHGGRCVTVFSAPNYCDQMGNKASYIHLQGSDLRPQFHQFTAVPHPNVKPMAYANTLLQLGMM

SEQ ID NO: 71 - protein, 699 aa, Homo sapiens; identical to SEQ ID NO: 23

SEQ ID NO: 72 - protein, 3114 aa, Homo sapiens
MSWALEEWKEGLPTRALQKIQELEGQLDKLKKEKQQRQFQLDSLEAALQKQKQKVENEKTEGTNLKRENQRLMEICESLEKTKQKISHELQVKESQVNFQEGQLNSGKKQIEKLEQELKRCKSELERSQQAAQSADVSLNPCNTPQKIFTTPLTPSQYYSGSKYEDLKEKYNKEVEERKRLEAEVKALQAKKASQTLPQATMNHRDIARHQASSSVFSWQQEKTPSHLSSNSQRTPIRRDFSASYFSGEQEVTPSRSTLQIGKRDANSSFFDNSSSPHLLDQLKAQNQELRNKINELELRLQGHEKEMKGQVNKFQELQLQLEKAKVELIEKEKVLNKCRDELVRTTAQYDQASTKYTALEQKLKKLTEDLSCQRQNAESARCSLEQKIKEKEKEFQEELSRQQRSFQTLDQECIQMKARLTQELQQAKNMHNVLQAELDKLTSVKQQLENNLEEFKQKLCRAEQAFQASQIKENELRRSMEEMKKENNLLKSHSEQKAREVCHLEAELKNIKQCLNQSQNFAEEMKAKNTSQETMLRDLQEKINQQENSLTLEKLKLAVADLEKQRDCSQDLLKKREHHIEQLNDKLSKTEKESKALLSALELKKKEYEELKEEKTLFSCWKSENEKLLTQMESEKENLQSKINHLETCLKTQQIKSHEYNERVRTLEMDRENLSVEIRNLHNVLDSKSVEVETQKLAYMELQQKAEFSDQKHQKEIENMCLKTSQLTGQVEDLEHKLQLLSNEIMDKDRCYQDLHAEYESLRDLLKSKDASLVTNEDHQRSLLAFDQQPAMHHSFANIIGEQGSMPSERSECRLEADQSPKNSAILQNRVDSLEFSLESQKQMNSDLQKQCEELVQIKGEIEENLMKAEQMHQSFVAETSQRISKLQEDTSAHQNVVAETLSALENKEKELQLLNDKVETEQAEIQELKKSNHLLEDSLKELQLLSETLSLEKKEMSSIISLNKREIEELTQENGTLKEINASLNQEKMNLIQKSESFANYIDEREKSISELSDQYKQEKLILLQRCEETGNAYEDLSQKYKAAQEKNSKLECLLNECTSLCENRKNELEQLKEAFAKEHQEFLTKLAFAEERNQNLMLELETVQQALRSEMTDNQNNSKSEAGGLKQEIMTLKEEQNKMQKEVNDLLQENEQLMKVMKTKHECQNLESEPIRNSVKERESERNQCNFKPQMDLEVKEISLDSYNAQLVQLEAMLRNKELKLQESEKEKECLQHELQTIRGDLETSNLQDMQSQEISGLKDCEIDAEEKYISGPHELSTSQNDNAHLQCSLQTTMNKLNELEKICEILQAEKYELVTELNDSRSECITATRKMAEEVGKLLNEVKILNDDSGLLHGELVEDIPGGEFGEQPNEQHPVSLAPLDESNSYEHLTLSDKEVQMHFAELQEKFLSLQSEHKILHDQHCQMSSKMSELQTYVDSLKAENLVLSTNLRNFQGDLVKEMQLGLEEGLVPSLSSSCVPDSSSLSSLGDSSFYRALLEQTGDMSLLSNLEGAVSANQCSVDEVFCSSLQEENLTRKETPSAPAKGVEELESLCEVYRQSLEKLEEKMESQGIMKNKEIQELEQLLSSERQELDCLRKQYLSENEQWQQKLTSVTLEMESKLAAEKKQTEQLSLELEVARLQLQGLDLSSRSLLGIDTEDAIQGRNESCDISKEHTSETTERTPKHDVHQICDKDAQQDLNLDIEKITETGAVKPTGECSGEQSPDTNYEPPGEDKTQGSSECISELSFSGPNALVPMDFLGNQEDIHNLQLRVKETSNENLRLLHVIEDRDRKVESLLNEMKELDSKLHLQEVQLMTKIEACIELEKIVGELKKENSDLSEKLEYFSCDHQELLQRVETSEGLNSDLEMHADKSSREDIGDNVAKVNDSWKERFLDVENELSRIRSEKASIEHEALYLEADLEVVQTEKLCLEKDNENKQKVIVCLEEELSVVTSERNQLRGELDTMSKKTTALDQLSEKMKEKTQELESHQSECLHCIQVAEAEVKEKTELLQTLSSDVSELLKDKTHLQEKLQSLEKDSQALSLTKCELENQIAQLNKEKELLVKESESLQARLSESDYEKLNVSKALEAALVEKGEFALRLSSTQEEVHQLRRGIEKLRVRIEADEKKQLHIAEKLKERERENDSLKDKVENLERELQMSEENQELVILDAENSKAEVETLKTQIEEMARSLKVFELDLVTLRSEKENLTKQIQEKQGQLSELDKLLSSFKSLLEEKEQAEIQIKEESKTAVEMLQNQLKELNEAVAALCGDQEIMKATEQSLDPPIEEEHQLRNSIEKLRARLEADEKKQLCVLQQLKESEHHADLLKGRVENLERELEIARTNQEHAALEAENSKGEVETLKAKIEGMTQSLRGLELDVVTIRSEKENLTNELQKEQERISELEIINSSFENILQEKEQEKVQMKEKSSTAMEMLQTQLKELNERVAALHNDQEACKAKEQNLSSQVECLELEKAQLLQGLDEAKNNYIVLQSSVNGLIQEVEDGKQKLEKKDEEISRLKNQIQDQEQLVSKLSQVEGEHQLWKEQNLELRNLTVELEQKIQVLQSKNASLQDTLEVLQSSYKNLENELELTKMDKMSFVEKVNKMTAKETELQREMHEMAQKTAELQEELSGEKNRLAGELQLLLEEIKSSKDQLKELTLENSELKKSLDCMHKDQVEKEGKVREEIAEYQLRLHEAEKKHQALLLDTNKQYEVEIQTYREKLTSKEECLSSQKLEIDLLKSSKEELNNSLKATTQILEELKKTKMDNLKYVNQLKKENERAQGKMKLLIKSCKQLEEEKEILQKELSQLQAAQEKQKTGTVMDTKVDELTTEIKELKETLEEKTKEADEYLDKYCSLLISHEKLEKAKEMLETQVAHLCSQQSKQDSRGSPLLGPVVPGPSPIPSVTEKRLSSGQNKASGKRQRSSGIWENGRGPTPATPESFSKKSKKAVMSGIHPAEDTEGTEFEPEGLPEVVKKGFADIPTGKTSPYILRRTTMATRTSPRLAAQKLALSPLSLGKENLAESSKPTAGGSRSQKVKVAQRSPVDSGTILREPTTKSVPVNNLPERSPTDSPREGLRVKRGRLVPSPKAGLESNGSENCKVQ

SEQ ID NO: 73 - protein, 599 aa, Homo sapiens
MPSSLPGSQVPHPTLDAVDLVEKTLRNEGTSSSAPVLEEGDTDPWTLPQLKDTSQPWKELRVAGRLRRVAGSVLKACGLLGSLYFFICSLDVLSSAFQLLGSKVAGDIFKDNVVLSNPVAGLVIGVLVTALVQSSSTSSSIVVSMVAAKLLTVRVSVPIIMGVNVGTSITSTLVSMAQSGDRDEFQRAFSGSAVHGIFNWLTVLVLLPLESATALLERLSELALGAASLTPRAQAPDILKVLTKPLTHLIVQLDSDMIMSSATGNATNSSLIKHWCGTTGQPTQENSSCGAFGPCTEKNSTAPADRLPCRHLFAGTELTDLAVGCILLAGSLLVLCGCLVLIVKLLNSVLRGRVAQVVRTVINADFPFPLGWLGGYLAVLAGAGLTFALQSSSVFTAAVVPLMGVGVISLDRAYPLLLGSNIGTTTTALLAALASPADRMLSALQVALIHFFFNLAGILLWYLVPALRLPIPLARHFGVVTARYRWVAGVYLLLGFLLLPLAAFGLSLAGGMVLAAVGGPLVGLVLLVILVTVLQRRRPAWLPVRLRSWAWLPVWLHSLEPWDRLVTRCCPCNVCSPPKATTKEAYCYENPEILASQQL

SEQ ID NO: 74 - protein, 527 aa, Homo sapiens
MENQEKASIAGHMFDVVVIGGGISGLSAAKLLTEYGVSVLVLEARDRVGGRTYTIRNEHVDYVDVGGAYVGPTQNRILRLSKELGIETYKVNVSERLVQYVKGKTYPFRGAFPPVWNPIAYLDYNNLWRTIDNMGKEIPTDAPWEAQHADKWDKMTMKELIDKICWTKTARRFAYLFVNINVTSEPHEVSALWFLWYVKQCGGTTRIFSVTNGGQERKFVGGSGQVSERIMDLLGDQVKLNHPVTHVDQSSDNIIIETLNHEHYECKYVINAIPPTLTAKIHFRPELPAERNQLIQRLPMGAVIKCMMYYKEAFWKKKDYCGCMIIEDEDAPISITLDDTKPDGSLPAIMGFILARKADRLAKLHKEIRKKKICELYAKVLGSQEALHPVHYEEKNWCEEQYSGGCYTAYFPPGIMTQYGRVIRQPVGRIFFAGTETATKWSGYMEGAVEAGERAAREVLNGLGKVTEKDIWVQEPESKDVPAVEITHTFWERNLPSVSGLLKIIGFSTSVTALGFVLYKYKLLPRS

SEQ ID NO: 75 - protein, 483 aa, Homo sapiens
MTMPVNGAHKDADLWSSHDKMLAQPLKDSDVEVYNIIKKESNRQRVGLELIASENFASRAVLEALGSCLNNKYSEGYPGQRYYGGTEFIDELETLCQKRALQAYKLDPQCWGVNVQPYSGSPANFAVYTALVEPHGRIMGLDLPDGGHLTHGFMTDKKKISATSIFFESMPYKVNPDTGYINYDQLEENARLFHPKLIIAGTSCYSRNLEYARLRKIADENGAYLMADMAHISGLVAAGVVPSPFEHCHVVTTTTHKTLRGCRAGMIFYRKGVKSVDPKTGKEILYNLESLINSAVFPGLQGGPHNHAIAGVAVALKQAMTLEFKVYQHQVVANCRALSEALTELGYKIVTGGSDNHLILVDLRSKGTDGGRAEKVLEACSIACNKNTCPGDRSALRPSGLRLGTPALTSRGLLEKDFQKVAHFIHRGIELTLQIQSDTGVRATLKEFKERLAGDKYQAAVQALREEVESFASLFPLPGLPDF

SEQ ID NO: 76 - protein, 394 aa, Homo sapiens
MDSALSDPHNGSAEAGGPTNSTTRPPSTPEGIALAYGSLLLMALLPIFFGALRSVRCARGKNASDMPETITSRDAARFPIIASCTLLGLYLFFKIFSQEYINLLLSMYFFVLGILALSHTISPFMNKFFPASFPNRQYQLLFTQGSGENKEEIINYEFDTKDLVCLGLSSIVGVWYLLRKHWIANNLFGLAFSLNGVELLHLNNVSTGCILLGGLFIYDVFWVFGTNVMVTVAKSFEAPIKLVFPQDLLEKGLEANNFAMLGLGDVVIPGIFIALLLRFDISLKKNTHTYFYTSFAAYIFGLGLTIFIMHIFKHAQPALLYLVPACIGFPVLVALAKGEVTEMFSYESSAEILPHTPRLTHFPTVSGSPASLADSMQQKLAGPRRRRPQNPSAM

SEQ ID NO: 77 - protein, 748 aa, Homo sapiens
MDVSGQETDWRSTAFRQKLVSQIEDAMRKAGVAHSKSSKDMESHVFLKAKTRDEYLSLVARLIIHFRDIHNKKSQASVSDPMNALQSLTGGPAAGAAGIGMPPRGPGQSLGGMGSLGAMGQPMSLSGQPPPGTSGMAPHSMAVVSTATPQTQLQLQQVALQQQQQQQQFQQQQQAALQQQQQQQQQQQFQAQQSAMQQQFQAVVQQQQQLQQQQQQQQHLIKLHHQNQQQIQQQQQQLQRIAQLQLQQQQQQQQQQQQQQQQALQAQPPIQQPPMQQPQPPPSQALPQQLQQMHHTQHHQPPPQPQQPPVAQNQPSQLPPQSQTQPLVSQAQALPGQMLYTQPPLKFVRAPMVVQQPPVQPQVQQQQTAVQTAQAAQMVAPGVQVSQSSLPMLSSPSPGQQVQTPQSMPPPPQPSPQPGQPSSQPNSNVSSGPAPSPSSFLPSPSPQPSQSPVTARTPQNFSVPSPGPLNTPVNPSSVMSPAGSSQAEEQQYLDKLKQLSKYIEPLRRMINKIDKNEDRKKDLSKMKSLLDILTDPSKRCPLKTLQKCEIALEKLKNDMAVPTPPPPPVPPTKQQYLCQPLLDAVLANIRSPVFNHSLYRTFVPAMTAIHGPPITAPVVCTRKRRLEDDERQSIPSVLQGEVARLDPKFLVNLDPSHCSNNGTVHLICKLDDKDLPSVPPLELSVPADYPAQSPLWIDRQWQYDANPFLQSVHRCMTSRLLQLPDKHSVTALLNTWAQSVHQACLSAA

SEQ ID NO: 78 - protein, 342 aa, Homo sapiens
MRKETPPPLVPPAAREWNLPPNAPACMERQLEAARYRSDGALLLGASSLSGRCWAGSLWLFKDPCAAPNEGFCSAGVQTEAGVADLTWVGERGILVASDSGAVELWELDENETLIVSKFCKYEHDDIVSTVSVLSSGTQAVSGSKDICIKVWDLAQQVVLSSYRAHAAQVTCVAASPHKDSVFLSCSEDNRILLWDTRCPKPASQIGCSAPGYLPTSLAWHPQQSEVFVFGDENGTVSLVDTKSTSCVLSSAVHSQCVTGLVFSPHSVPFLASLSEDCSLAVLDSSLSELFRSQAHRDFVRDATWSPLNHSLLTTVGWDHQVVHHVVPTEPLPAPGPASVTE

SEQ ID NO: 79 - protein, 1555 aa, Homo sapiens
MGCKGDASGACAAGALPVTGVCYKMGVLVVLTVLWLFSSVKADSKAITTSLTTKWFSTPLLLEASEFLAEDSQEKFWNFVEASQNIGSSDHDGTDYSYYHAILEAAFQFLSPLQQNLFKFCLSLRSYSATIQAFQQIAADEPPPEGCNSFFSVHGKKTCESDTLEALLLTASERPKPLLFKGDHRYPSSNPESPVVIFYSEIGSEEFSNFHRQLISKSNAGKINYVFRHYIFNPRKEPVYLSGYGVELAIKSTEYKAKDDTQVKGTEVNTTVIGENDPIDEVQGFLFGKLRDLHPDLEGQLKELRKHLVESTNEMAPLKVWQLQDLSFQTAARILASPVELALVVMKDLSQNFPTKARAITKTAVSSELRTEVEENQKYFKGTLGLQPGDSALFINGLHMDLDTQDIFSLFDVLRNEARVMEGLHRLGIEGLSLHNVLKLNIQPSEADYAVDIRSPAISWVNNLEVDSRYNSWPSSLQELLRPTFPGVIRQIRKNLHNMVFIVDPAHETTAELMNTAEMFLSNHIPLRIGFIFVVNDSEDVDGMQDAGVAVLRAYNYVAQEVDDYHAFQTLTHIYNKVRTGEKVKVEHVVSVLEKKYPYVEVNSILGIDSAYDRNRKEARGYYEQTGVGPLPVVLFNGMPFEREQLDPDELETITMHKILETTTFFQRAVYLGELPHDQDVVEYIMNQPNVVPRINSRILTAERDYLDLTASNNFFVDDYARFTILDSQGKTAAVANSMNYLTKKGMSSKEIYDDSFIRPVTFWIVGDFDSPSGRQLLYDAIKHQKSSNNVRISMINNPAKEISYENTQISRAIWAALQTQTSNAAKNFITKMAKEGAAEALAAGADIAEFSVGGMDFSLFKEVFESSKMDFILSHAVYCRDVLKLKKGQRAVISNGRIIGPLEDSELFNQDDFHLLENIILKTSGQKIKSHIQQLRVEEDVASDLVMKVDALLSAQPKGDPRIEYQFFEDRHSAIKLRPKEGETYFDVVAVVDPVTREAQRLAPLLLVLAQLINMNLRVFMNCQSKLSDMPLKSFYRYVLEPEISFTSDNSFAKGPIAKFLDMPQSPLFTLNLNTPESWMVESVRTPYDLDNIYLEEVDSVVAAEYELEYLLLEGHCYDITTGQPPRGLQFTLGTSANPVIVDTIVMANLGYFQLKANPGAWILRLRKGRSEDIYRIYSHDGTDSPPDADEVVIVLNNFKSKIIKVKVQKKADMVNEDLLSDGTSENESGFWDSFKWGFTGQKTEEVKQDKDDIINIFSVASGHLYERFLRIMMLSVLKNTKTPVKFWFLKNYLSPTFKEFIPYMANEYNFQYELVQYKWPRWLHQQTEKQRIIWGYKILFLDVLFPLVVDKFLFVDADQIVRTDLKELRDFNLDGAPYGYTPFCDSRREMDGYRFWKSGYWASHLAGRKYHISALYVVDLKKFRKIAAGDRLRGQYQGLSQDPNSLSNLDQDLPNNMIHQVPIKSLPQEWLWCETWCDDASKKRAKTIDLCNNPMTKEPKLEAAVRIVPEWQDYDQEIKQLQIRFQKEKETGALYKEKTKEPSREGPQKREEL

SEQ ID NO: 80 - protein, 453 aa, Homo sapiens; identical to SEQ ID NO: 53

SEQ ID NO: 81 - protein, 1074 aa, Homo sapiens; identical to SEQ ID NO: 65

SEQ ID NO: 82 - protein, 666 aa, Homo sapiens
MGESSEDIDQMFSTLLGEMDLLTQSLGVDTLPPPDPNPPRAEFNYSVGFKDLNESLNALEDQDLDALMADLVADISEAEQRTIQAQKESLQNQHHSASLQASIFSGAASLGYGTNVAATGISQYEDDLPPPPADPVLDLPLPPPPPEPLSQEEEEAQAKADKIKLALEKLKEAKVKKLVVKVHMNDNSTKSLMVDERQLARDVLDNLFEKTHCDCNVDWCLYEIYPELQIERFFEDHENVVEVLSDWTRDTENKILFLEKEEKYAVFKNPQNFYLDNRGKKESKETNEKMNAKNKESLLEESFCGTSIIVPELEGALYLKEDGKKSWKRRYFLLRASGIYYVPKGKTKTSRDLACFIQFENVNIYYGTQHKMKYKAPTDYCFVLKHPQIQKESQYIKYLCCDDTRTLNQWVMGIRIAKYGKTLYDNYQRAVAKAGLASRWTNLGTVNAAAPAQPSTGPKTGTTQPNGQIPQATHSVSAVLQEAQRHAETSKDKKPALGNHHDPAVPRAPHAPKSSLPPPPPVRRSSDTSGSPATPLKAKGTGGGGLPAPPDDFLPPPPPPPPLDDPELPPPPPDFMEPPPDFVPPPPPSYAGIAGSELPPPPPPPPAPAPAPVPDSARPPPAVAKRPPVPPKRQENPGHPGGAGGGEQDFMSDLMKALQKKRGNVS

SEQ ID NO: 83 - protein, 1234 aa, Homo sapiens
MAGAQPGVHALQLEPPTVVETLRRGSKFIKWDEETSSRNLVTLRVDPNGFFLYWTGPNMEVDTLDISSIRDTRTGRYARLPKDPKIREVLGFGGPDARLEEKLMTVVSGPDPVNTVFLNFMAVQDDTAKVWSEELFKLAMNILAQNASRNTFLRKAYTKLKLQVNQDGRIPVKNILKMFSADKKRVETALESCGLKFNRSESIRPDEFSLEIFERFLNKLCLRPDIDKILLEIGAKGKPYLTLEQLMDFINQKQRDPRLNEVLYPPLRPSQARLLIEKYEPNQQFLERDQMSMEGFSRYLGGEENGILPLEALDLSTDMTQPLSAYFINSSHNTYLTAGQLAGTSSVEMYRQALLWGCRCVELDVWKGRPPEEEPFITHGFTMTTEVPLRDVLEAIAETAFKTSPYPVILSFENHVDSAKQQAKMAEYCRSIFGDALLIEPLDKYPLAPGVPLPSPQDLMGRILVKNKKRHRPSAGGPDSAGRKRPLEQSNSALSESSAATEPSSPQLGSPSSDSCPGLSNGEEVGLEKPSLEPQKSLGDEGLNRGPYVLGPADREDEEEDEEEEEQTDPKKPTTDEGTASSEVNATEEMSTLVNYIEPVKFKSFEAARKRNKCFEMSSFVETKAMEQLTKSPMEFVEYNKQQLSRIYPKGTRVDSSNYMPQLFWNVGCQLVALNFQTLDVAMQLNAGVFEYNGRSGYLLKPEFMRRPDKSFDPFTEVIVDGIVANALRVKVISGQFLSDRKVGIYVEVDMFGLPVDTRRKYRTRTSQGNSFNPVWDEEPFDFPKVVLPTLASLRIAAFEEGGKFVGHRILPVSAIRSGYHYVCLRNEANQPLCLPALLIYTEASDYIPDDHQDYAEALINPIKHVSLMDQRARQLAALIGESEAQAGQETCQDTQSQQLGSQPSSNPTPSPLDASPRRPPGPTTSPASTSLSSPGQRDDLIASILSEVAPTPLDELRGHKALVKLRSRQERDLRELRKKHQRKAVTLTRRLLDGLAQAQAEGRCRLRPGALGGAADVEDTKEGEDEAKRYQEFQNRQVQSLLELREAQVDAEAQRRLEHLRQALQRLREVVLDANTTQFKRLKEMNEREKKELQKILDRKRHNSISEAKMRDKHKKEAELTEINRRHITESVNSIRRLEEAQKQRHDRLVAGQQQVLQQLAEEEPKLLAQLAQECQEQRARLPQEIRRSLLGEMPEGLGDGPLVACASNGHAPGSSGHLSGADSESQEENTQL

SEQ ID NO: 84 - protein, 613 aa, Homo sapiens
MGALRPTLLPPSLPLLLLLMLGMGCWAREVLVPEGPLYRVAGTAVSISCNVTGYEGPAQQNFEWFLYRPEAPDTALGIVSTKDTQFSYAVFKSRVVAGEVQVQRLQGDAVVLKIARLQAQDAGIYECHTPSTDTRYLGSYSGKVELRVLPDVLQVSAAPPGPRGRQAPTSPPRMTVHEGQELALGCLARTSTQKHTHLAVSFGRSVPEAPVGRSTLQEVVGIRSDLAVEAGAPYAERLAAGELRLGKEGTDRYRMVVGGAQAGDAGTYHCTAAEWIQDPDGSWAQIAEKRAVLAHVDVQTLSSQLAVTVGPGERRIGPGEPLELLCNVSGALPPAGRHAAYSVGWEMAPAGAPGPGRLVAQLDTEGVGSLGPGYEGRHIAMEKVASRTYRLRLEAARPGDAGTYRCLAKAYVRGSGTRLREAASARSRPLPVHVREEGVVLEAVAWLAGGTVYRGETASLLCNISVRGGPPGLRLAASWWVERPEDGELSSVPAQLVGGVGQDGVAELGVRPGGGPVSVELVGPRSHRLRLHSLGPEDEGVYHCAPSAWVQHADYSWYQAGSARSGPVTVYPYMHALDTLFVPLLVGTGVALVTGATVLGTITCCFMKRLRKR

SEQ ID NO: 85 - protein, 130 aa, Homo sapiens
MSSSGGAPGASASSAPPAQEEGMTWWYRWLCRLSGVLGAVSCAISGLFNCITIHPLNIAAGVWMMMAVVPIVISLTLTTLLGNAIAFATGVLYGLSALGKKGDAISYARIQQQRQQADEEKLAETLEGEL

SEQ ID NO: 86 - protein, 392 aa, Homo sapiens
MDALVEDDICILNHEKAHKRDTVTPVSIYSGDESVASHFALVTAYEDIKKRLKDSEKENSLLKKRIRFLEEKLIARFEEETSSVGREQVNKAYHAYREVCIDRDNLKSKLDKMNKDNSESLKVLNEQLQSKEVELLQLRTEVETQQVMRNLNPPSSNWEVEKLSCDLKIHGLEQELELMRKECSDLKIELQKAKQTDPYQEDNLKSRDLQKLSISSDNMQHAYWELKREMSNLHLVTQVQAELLRKLKTSTAIKKACAPVGCSEDLGRDSTKLHLMNFTATYTRHPPLLPNGKALCHTTSSPLPGDVKVLSEKAILQSWTDNERSIPNDGTCFQEHSSYGRNSLEDNSWVFPSPPKSSETAFGETKTKTLPLPNLPPLHYLDQHNQNCLYKN

SEQ ID NO: 87 - protein, 221 aa, Homo sapiens
MASSTSLPAPGSRPKKPLGKMADWFRQTLLKKPKKRPNSPESTSSDASQPTSQDSPLPPSLSSVTSPSLPPTHASDSGSSRWSKDYDVCVCHSEEDLVAAQDLVSYLEGSTASLRCFLQLRDATPGGAIVSELCQALSSSHCRVLLITPGFLQDPWCKYQMLQALTEAPGAEGCTIPLLSGLSRAAYPPELRFMYYVDGRGPDGGFRQVKEAVMRYLQTLS

SEQ ID NO: 88 - protein, 116 aa, Homo sapiens
MSATAATAPPAAPAGEGGPPAPPPNLTSNRRLQQTQAQVDEVVDIMRVNVDKVLERDQKLSELDDRADALQAGASQFETSAAKLKRKYWWKNLKMMIILGVICAIILIIIIVYFST

SEQ ID NO: 89 - protein, 159 aa, Homo sapiens
MALETICRPSGRKSSKMQAFRIWDVNQKTFYLRNNQLVAGYLQGPNVNLEEKIDVVPIEPHALFLGIHGGKMCLSCVKSGDETRLQLEAVNITDLSENRKQDKRFAFIRSDSGPTTSFESAACPGWFLCTAMEADQPVSLTNMPDEGVMVTKFYFQEDE

SEQ ID NO: 90 - protein, 212 aa, Homo sapiens
MKATIILLLLAQVSWAGPFQQRGLFDFMLEDEASGIGPEVPDDRDFEPSLGPVCPFRCQCHLRVVQCSDLGLPPSLTELHLDGNKISRVDAASLKGLNNLAKLGLSFNSISAVDNGSLANTPHLRELHLDNNKLTRVPGGLAEHKYIQVVYLHNNNISVVGSSDFCPPGHNTKKASYSGVSLFSNPVQYWEIQPSTFRCVYVRSAIQLGNYK

SEQ ID NO: 91 - protein, 714 aa, Homo sapiens
MMQESATETISNSSMNQNGMSTLSSQLDAGSRDGRSSGDTSSEVSTVELLHLQQQQALQAARQLLLQQQTSGLKSPKSSDKQRPLQVPVSVAMMTPQVITPQQMQQILQQQVLSPQQLQALLQQQQAVMLQQQQLQEFYKKQQEQLHLQLLQQQQQQQQQQQQQQQQQQQQQQQQQQQQQQQQQQQQQQQQHPGKQAKEQQQQQQQQQLAAQQLVFQQQLLQMQQLQQQQHLLSLQRQGLISIPPGQAALPVQSLPQAGLSPAEIQQLWKEVTGVHSMEDNGIKHGGLDLTTNNSSSTTSSNTSKASPPITHHSIVNGQSSVLSARRDSSSHEETGASHTLYGHGVCKWPGCESICEDFGQFLKHLNNEHALDDRSTAQCRVQMQVVQQLEIQLSKERERLQAMMTHLHMRPSEPKPSPKPLNLVSSVTMSKNMLETSPQSLPQTPTTPTAPVTPITQGPSVITPASVPNVGAIRRRHSDKYNIPMSSEIAPNYEFYKNADVRPPFTYATLIRQAIMESSDRQLTLNEIYSWFTRTFAYFRRNAATWKNAVRHNLSLHKCFVRVENVKGAVWTVDEVEYQKRRSQKITGSPTLVKNIPTSLGYGAALNASLQAALAESSLPLLSNPGLINNASSGLLQAVHEDLNGSLDHIDSNGNSSPGCSPQPHIHSIHVKEEPVIAEDEDCPMSLVTTANHSPELEDDREIEEEPLSEDLE

SEQ ID NO: 92 - protein, 298 aa, Homo sapiens
MVRMVPVLLSLLLLLGPAVPQENQDGRYSLTYIYTGLSKHVEDVPAFQALGSLNDLQFFRYNSKDRKSQPMGLWRQVEGMEDWKQDSQLQKAREDIFMETLKDIVEYYNDSNGSHVLQGRFGCEIENNRSSGAFWKYYYDGKDYIEFNKEIPAWVPFDPAAQITKQKWEAEPVYVQRAKAYLEEECPATLRKYLKYSKNILDRQDPPSVVVTSHQAPGEKKKLKCLAYDFYPGKIDVHWTRAGEVQEPELRGDVLHNGNGTYQSWVVVAVPPQDTAPYSCHVQHSSLAQPLVVPWEAS

SEQ ID NO: 93 - protein, 214 aa, Homo sapiens
MRPKTGQVGCETPEELGPGPRQRWPLLLLGLAMVAHGLLRPMVAPQSGDPDPGASVGSSRSSLRSLWGRLLLQPSPQRADPRCWPRGFWSEPQSLCYVFGTGTKVTVLGQPKANPTVTLFPPSSEELQANKATLVCLISDFYPGAVTVAWKADGSPVKAGVETTKPSKQSNNKYAASSYLSLTPEQWKSHRSYSCQVTHEGSTVEKTVAPTECS

SEQ ID NO: 94 - protein, 520 aa, Homo sapiens
MVARVGLLLRALQLLLWGHLDAQPAERGGQELRKEAEAFLEKYGYLNEQVPKAPTSTRFSDAIRAFQWVSQLPVSGVLDRATLRQMTRPRCGVTDTNSYAAWAERISDLFARHRTKMRRKKRFAKQGNKWYKQHLSYRLVNWPEHLPEPAVRGAVRAAFQLWSNVSALEFWEAPATGPADIRLTFFQGDHNDGLGNAFDGPGGALAHAFLPRRGEAHFDQDERWSLSRRRGRNLFVVLAHEIGHTLGLTHSPAPRALMAPYYKRLGRDALLSWDDVLAVQSLYGKPLGGSVAVQLPGKLFTDFETWDSYSPQGRRPETQGPKYCHSSFDAITVDRQQQLYIFKGSHFWEVAADGNVSEPRPLQERWVGLPPNIEAAAVSLNDGDFYFFKGGRCWRFRGPKPVWGLPQLCRAGGLPRHPDAALFFPPLRRLILFKGARYYVLARGGLQVEPYYPRSLQDWGGIPEEVSGALPRPDGSIIFFRDDRYWRLDQAKLQATTSGRWATELPWMGCWHANSGSALF

SEQ ID NO: 95 - protein, 1156 aa, Homo sapiens
MSKLRMVLLEDSGSADFRRHFVNLSPFTITVVLLLSACFVTSSLGGTDKELRLVDGENKCSGRVEVKVQEEWGTVCNNGWSMEAVSVICNQLGCPTAIKAPGWANSSAGSGRIWMDHVSCRGNESALWDCKHDGWGKHSNCTHQQDAGVTCSDGSNLEMRLTRGGNMCSGRIEIKFQGRWGTVCDDNFNIDHASVICRQLECGSAVSFSGSSNFGEGSGPIWFDDLICNGNESALWNCKHQGWGKHNCDHAEDAGVICSKGADLSLRLVDGVTECSGRLEVRFQGEWGTICDDGWDSYDAAVACKQLGCPTAVTAIGRVNASKGFGHIWLDSVSCQGHEPAVWQCKHHEWGKHYCNHNEDAGVTCSDGSDLELRLRGGGSRCAGTVEVEIQRLLGKVCDRGWGLKEADVVCRQLGCGSALKTSYQVYSKIQATNTWLFLSSCNGNETSLWDCKNWQWGGLTCDHYEEAKITCSAHREPRLVGGDIPCSGRVEVKHGDTWGSICDSDFSLEAASVLCRELQCGTVVSILGGAHFGEGNGQIWAEEFQCEGHESHLSLCPVAPRPEGTCSHSRDVGVVCSRYTEIRLVNGKTPCEGRVELKTLGAWGSLCNSHWDIEDAHVLCQQLKCGVALSTPGGARFGKGNGQIWRHMFHCTGTEQHMGDCPVTALGASLCPSEQVASVICSGNQSQTLSSCNSSSLGPTRPTIPEESAVACIESGQLRLVNGGGRCAGRVEIYHEGSWGTICDDSWDLSDAHVVCRQLGCGEAINATGSAHFGEGTGPIWLDEMKCNGKESRIWQCHSHGWGQQNCRHKEDAGVICSEFMSLRLTSEASREACAGRLEVFYNGAWGTVGKSSMSETTVGVVCRQLGCADKGKINPASLDKAMSIPMWVDNVQCPKGPDTLWQCPSSPWEKRLASPSEETWITCDNKIRLQEGPTSCSGRVEIWHGGSWGTVCDDSWDLDDAQVVCQQLGCGPALKAFKEAEFGQGTGPIWLNEVKCKGNESSLWDCPARRWGHSECGHKEDAAVNCTDISVQKTPQKATTGRSSRQSSFIAVGILGVVLLAIFVALFFLTKKRRQRQRLAVSSRGENLVHQIQYREMNSCLNADDLDLMNSSENSHESADFSAAELISVSKFLPISGMEKEAILSHTEKENGNL

SEQ ID NO: 96 - protein, 2210 aa, Homo sapiens
MTAAANWVANGASLEDCHSNLFSLAELTGIKWRRYNFGGHGDCGPIISAPAQDDPILLSFIRCLQANLLCVWRRDVKPDCKELWIFWWGDEPNLVGVIHHELQVVEEGLWENGLSYECRTLLFKAIHNLLERCLMDKNFVRIGKWFVRPYEKDEKPVNKSEHLSCAFTFFLHGESNVCTSVEIAQHQPIYLINEEHIHMAQSSPAPFQVLVSPYGLNGTLTGQAYKMSDPATRKLIEEWQYFYPMVLKKKEESKEEDELGYDDDFPVAVEVIVGGVRMVYPSAFVLISQNDIPVPQSVASAGGHIAVGQQGLGSVKDPSNCGMPLTPPTSPEQAILGESGGMQSAASHLVSQDGGMITMHSPKRSGKIPPKLHNHMVHRVWKECILNRTQSKRSQMSTPTLEEEPASNPATWDFVDPTQRVSCSCSRHKLLKRCAVGPNRPPTVSQPGFSAGPSSSSSLPPPASSKHKTAERQEKGDKLQKRPLIPFHHRPSVAEELCMEQDTPGQKLGLAGIDSSLEVSSSRKYDKQMAVPSRNTSKQMNLNPMDSPHSPISPLPPTLSPQPRGQETESLDPPSVPVNPALYGNGLELQQLSTLDDRTVLVGQRLPLMAEVSETALYCGIRPSNPESSEKWWHSYRLPPSDDAEFRPPELQGERCDAKMEVNSESTALQRLLAQPNKRFKIWQDKQPQLQPLHFLDPLPLSQQPGDSLGEVNDPYTFEDGDIKYIFTANKKCKQGTEKDSLKKNKSEDGFGTKDVTTPGHSTPVPDGKNAMSIFSSATKTDVRQDNAAGRAGSSSLTQVTDLAPSLHDLDNIFDNSDDDELGAVSPALRSSKMPAVGTEDRPLGKDGRAAVPYPPTVADLQRMFPTPPSLEQHPAFSPVMNYKDGISSETVTALGMMESPMVSMVSTQLTEFKMEVEDGLGSPKPEEIKDFSYVHKVPSFQPFVGSSMFAPLKMLPSHCLLPLKIPDACLFRPSWAIPPKIEQLPMPPAATFIRDGYNNVPSVGSLADPDYLNTPQMNTPVTLNSAAPASNSGAGVLPSPATPRFSVPTPRTPRTPRTPRGGGTASGQGSVKYDSTDQGSPASTPSTTRPLNSVEPATMQPIPEAHSLYVTLILSDSVMNIFKDRNFDSCCICACNMNIKGADVGLYIPDSSNEDQYRCTCGFSAIMNRKLGYNSGLFLEDELDIFGKNSDIGQAAERRLMMCQSTFLPQVEGTKKPQEPPISLLLLLQNQHTQPFASLNFLDYISSNNRQTLPCVSWSYDRVQADNNDYWTECFNALEQGRQYVDNPTGGKVDEALVRSATVHSWPHSNVLDISMLSSQDVVRMLLSLQPFLQDAIQKKRTGRTWENIQHVQGPLTWQQFHKMAGRGTYGSEESPEPLPIPTLLVGYDKDFLTISPFSLPFWERLLLDPYGGHRDVAYIVVCPENEALLEGAKTFFRDLSAVYEMCRLGQHKPICKVLRDGIMRVGKTVAQKLTDELVSEWFNQPWSGEENDNHSRLKLYAQVCRHHLAPYLATLQLDSSLLIPPKYQTPPAAAQGQATPGNAGPLAPNGSAAPPAGSAFNPTSNSSSTNPAASSSASGSSVPPVSSSASAPGISQISTTSSSGFSGSVGGQNPSTGGISADRTQGNIGCGGDTDPGQSSSQPSQDGQESVTERERIGIPTEPDSADSHAHPPAVVIYMVDPFTYAAEEDSTSGNFWLLSLMRCYTEMLDNLPEHMRNSFILQIVPCQYMLQTMKDEQVFYIQYLKSMAFSVYCQCRRPLPTQIHIKSLTGFGPAASIEMTLKNPERPSPIQLYSPPFILAPIKDKQTELGETFGEASQKYNVLFVGYCLSHDQRWLLASCTDLHGELLETCVVNIALPNRSRRSKVSARKIGLQKLWEWCIGIVQMTSLPWRVVIGRLGRLGHGELKDWSILLGECSLQTISKKLKDVCRMCGISAADSPSILSACLVAMEPQGSFVVMPDAVTMGSVFGRSTALNMQSSQLNTPQDASCTHILVFPTSSTIQVAPANYPNEDGFSPNNDDMFVDLPFPDDMDNDIGILMTGNLHSSPNSSPVPSPGSPSGIGVGSHFQHSRSQGERLLSREAPEELKQQPLALGYFVSTAKAENLPQWFWSSCPQAQNQCPLFLKASLHHHISVAQTDELLPARNSQRVPHPLDSKTTSDVLRFVLEQYNALSWLTCNPATQDRTSCLPVHFVVLTQLYNAIMNIL

SEQ ID NO: 97 - protein, 570 aa, Homo sapiens
MGNWAVNEGLSIFVILVWLGLNVFLFVWYYRVYDIPPKFFYTRKLLGSALALARAPAACLNFNCMLILLPVCRNLLSFLRGSSACCSTRVRRQLDRNLTFHKMVAWMIALHSAIHTIAHLFNVEWCVNARVNNSDPYSVALSELGDRQNESYLNFARKRIKNPEGGLYLAVTLLAGITGVVITLCLILIITSSTKTIRRSYFEVFWYTHHLFVIFFIGLAIHGAERIVRGQTAESLAVHNITVCEQKISEWGKIKECPIPQFAGNPPMTWKWIVGPMFLYLCERLVRFWRSQQKVVITKVVTHPFKTIELQMKKKGFKMEVGQYIFVKCPKVSKLEWHPFTLTSAPEEDFFSIHIRIVGDWTEGLFNACGCDKQEFQDAWKLPKIAVDGPFGTASEDVFSYEVVMLVGAGIGVTPFASILKSVWYKYCNNATNLKLKKIYFYWLCRDTHAFEWFADLLQLLESQMQERNNAGFLSYNIYLTGWDESQANHFAVHHDEEKDVITGLKQKTLYGRPNWDNEFKTIASQHPNTRIGVFLCGPEALAETLSKQSISNSESGPRGVHFIFNKENF

SEQ ID NO: 98 - protein, 676 aa, Homo sapiens
MAPFLRIAFNSYELGSLQAEDEANQPFCAVKMKEALSTERGKTLVQKKPTMYPEWKSTFDAHIYEGRVIQIVLMRAAEEPVSEVTVGVSVLAERCKKNNGKAEFWLDLQPQAKVLMSVQYFLEDVDCKQSMRSEDEAKFPTMNRRGAIKQAKIHYIKNHEFIATFFGQPTFCSVCKDFVWGLNKQGYKCRQCNAAIHKKCIDKIIGRCTGTAANSRDTIFQKERFNIDMPHRFKVHNYMSPTFCDHCGSLLWGLVKQGLKCEDCGMNVHHKCREKVANLCGINQKLLAEALNQVTQRASRRSDSASSEPVGIYQGFEKKTGVAGEDMQDNSGTYGKIWEGSSKCNINNFIFHKVLGKGSFGKVLLGELKGRGEYFAIKALKKDVVLIDDDVECTMVEKRVLTLAAENPFLTHLICTFQTKDHLFFVMEFLNGGDLMYHIQDKGRFELYRATFYAAEIMCGLQFLHSKGIIYRDLKLDNVLLDRDGHIKIADFGMCKENIFGESRASTFCGTPDYIAPEILQGLKYTFSVDWWSFGVLLYEMLIGQSPFHGDDEDELFESIRVDTPHYPRWITKESKDILEKLFEREPTKRLGVTGNIKIHPFFKTINWTLLEKRRLEPPFRPKVKSPRDYSNFDQEFLNEKARLSYSDKNLIDSMDQSAFAGFSFVNPKFEHLLED

SEQ ID NO: 99 - protein, 457 aa, Homo sapiens
MSKPHSEAGTAFIQTQQLHAAMADTFLEHMCRLDIDSPPITARNTGIICTIGPASRSVELKKGATLKITLDNAYMEKCDENILWLDYKNICKVVEVGSKIYVDDGLISLQVKQKGADFLVTEVENGGSLGSKKGVNLPGAAVDLPAVSEKDIQDLKFGVEQDVDMVFASFIRKASDVHEVRKVLGEKGKNIKIISKIENHEGVRRFDEILEASDGIMVARGDLGIEIPAEKVFLAQKMMIGRCNRAGKPVICATQMLESMIKKPRPTRAEGSDVANAVLDGADCIMLSGETAKGDYPLEAVRMQHLIAREAEAAIYHLQLFEELRRLAPITSDPTEATAVGAVEASFKCCSGAIIVLTKSGRSAHQVARYRPRAPIIAVTRNPQTARQAHLYRGIFPVLCKDPVQEAWAEDVDLRVNFAMNVGKARGFFKKGDVVIVLTGWRPGSGFTNTMRVVPVP

SEQ ID NO: 100 - protein, 3259 aa, Homo sapiens
MLSRLSGLANVVLHELSGDDDTDQNMRAPLDPELHQESDMEFNNTTQEDVQERLAYAEQLVVELKDIIRQKDVQLQQKDEALQEERKAADNKIKKLKLHAKAKLTSLNKYIEEMKAQGGTVLPTEPQSEEQLSKHDKSSTEEEMEIEKIKHKLQEKEELISTLQAQLTQAQAEQPAQSSTEMEEFVMMKQQLQEKEEFISTLQAQLSQTQAEQAAQQVVREKDARFETQVRLHEDELLQLVTQADVETEMQQKLRVLQRKLEEHEESLVGRAQVVDLLQQELTAAEQRNQILSQQLQQMEAEHNTLRNTVETEREESKILLEKMELEVAERKLSFHNLQEEMHHLLEQFEQAGQAQAELESRYSALEQKHKAEMEEKTSHILSLQKTGQELQSACDALKDQNSKLLQDKNEQAVQSAQTIQQLEDQLQQKSKEISQFLNRLPLQQHETASQTSFPDVYNEGTQAVTEENIASLQKRVVELENEKGALLLSSIELEELKAENEKLSSQITLLEAQNRTGEADREVSEISIVDIANKRSSSAEESGQDVLENTFSQKHKELSVLLLEMKEAQEEIAFLKLQLQGKRAEEADHEVLDQKEMKQMEGEGIAPIKMKVFLEDTGQDFPLMPNEESSLPAVEKEQASTEHQSRTSEEISLNDAGVELKSTKQDGDKSLSAVPDIGQCHQDELERLKSQILELELNFHKAQEIYEKNLDEKAKEISNLNQLIEEFKKNADNNSSAFTALSEERDQLLSQVKELSMVTELRAQVKQLEMNLAEAERQRRLDYESQTAHDNLLTEQIHSLSIEAKSKDVKIEVLQNELDDVQLQFSEQSTLIRSLQSQLQNKESEVLEGAERVRHISSKVEELSQALSQKELEITKMDQLLLEKKRDVETLQQTIEEKDQQVTEISFSMTEKMVQLNEEKFSLGVEIKTLKEQLNLLSRAEEAKKEQVEEDNEVSSGLKQNYDEMSPAGQISKEELQHEFDLLKKENEQRKRKLQAALINRKELLQRVSRLEEELANLKDESKKEIPLSETERGEVEEDKENKEYSEKCVTSKCQEIEIYLKQTISEKEVELQHIRKDLEEKLAAEEQFQALVKQMNQTLQDKTNQIDLLQAEISENQAIIQKLITSNTDASDGDSVALVKETVVISPPCTGSSEHWKPELEEKILALEKEKEQLQKKLQEALTSRKAILKKAQEKERHLREELKQQKDDYNRLQEQFDEQSKENENIGDQLRQLQIQVRESIDGKLPSTDQQESCSSTPGLEEPLFKATEQHHTQPVLESNLCPDWPSHSEDASALQGGTSVAQIKAQLKEIEAEKVELELKVSSTTSELTKKSEEVFQLQEQINKQGLEIESLKTVSHEAEVHAESLQQKLESSQLQIAGLEHLRELQPKLDELQKLISKKEEDVSYLSGQLSEKEAALTKIQTEIIEQEDLIKALHTQLEMQAKEHDERIKQLQVELCEMKQKPEEIGEESRAKQQIQRKLQAALISRKEALKENKSLQEELSLARGTIERLTKSLADVESQVSAQNKEKDTVLGRLALLQEERDKLITEMDRSLLENQSLSSSCESLKLALEGLTEDKEKLVKEIESLKSSKIAESTEWQEKHKELQKEYEILLQSYENVSNEAERIQHVVEAVRQEKQELYGKLRSTEANKKETEKQLQEAEQEMEEMKEKMRKFAKSKQQKILELEEENDRLRAEVHPAGDTAKECMETLLSSNASMKEELERVKMEYETLSKKFQSLMSEKDSLSEEVQDLKHQIEGNVSKQANLEATEKHDNQTNVTEEGTQSIPGETEEQDSLSMSTRPTCSESVPSAKSANPAVSKDFSSHDEINNYLQQIDQLKERIAGLEEEKQKNKEFSQTLENEKNTLLSQISTKDGELKMLQEEVTKMNLLNQQIQEELSRVTKLKETAEEEKDDLEERLMNQLAELNGSIGNYCQDVTDAQIKNELLESEMKNLKKCVSELEEEKQQLVKEKTKVESEIRKEYLEKIQGAQKEPGNKSHAKELQELLKEKQQEVKQLQKDCIRYQEKISALERTVKALEFVQTESQKDLEITKENLAQAVEHRKKAQAELASFKVLLDDTQSEAARVLADNLKLKKELQSNKESVKSQMKQKDEDLERRLEQAEEKHLKEKKNMQEKLDALRREKVHLEETIGEIQVTLNKKDKEVQQLQENLDSTVTQLAAFTKSMSSLQDDRDRVIDEAKKWERKFSDAIQSKEEEIRLKEDNCSVLKDQLRQMSIHMEELKINISRLEHDKQIWESKAQTEVQLQQKVCDTLQGENKELLSQLEETRHLYHSSQNELAKLESELKSLKDQLTDLSNSLEKCKEQKGNLEGIIRQQEADIQNSKFSYEQLETDLQASRELTSRLHEEINMKEQKIISLLSGKEEAIQVAIAELRQQHDKEIKELENLLSQEEEENIVLEEENKKAVDKTNQLMETLKTIKKENIQQKAQLDSFVKSMSSLQNDRDRIVGDYQQLEERHLSIILEKDQLIQEAAAENNKLKEEIRGLRSHMDDLNSENAKLDAELIQYREDLNQVITIKDSQQKQLLEVQLQQNKELENKYAKLEEKLKESEEANEDLRRSFNALQEEKQDLSKEIESLKVSISQLTRQVTALQEEGTLGLYHAQLKVKEEEVHRLSALFSSSQKRIAELEEELVCVQKEAAKKVGEIEDKLKKELKHLHHDAGIMRNETETAEERVAELARDLVEMEQKLLMVTKENKGLTAQIQSFGRSMSSLQNSRDHANEELDELKRKYDASLKELAQLKEQGLLNRERDALLSETAFSMNSTEENSLSHLEKLNQQLLSKDEQLLHLSSQLEDSYNQVQSFSKAMASLQNERDHLWNELEKFRKSEEGKQRSAAQPSTSPAEVQSLKKAMSSLQNDRDRLLKELKNLQQQYLQINQEITELHPLKAQLQEYQDKTKAFQIMQEELRQENLSWQHELHQLRMEKSSWEIHERRMKEQYLMAISDKDQQLSHLQNLIRELRSSSSQTQPLKVQYQRQASPETSASPDGSQNLVYETELLRTQLNDSLKEIHQKELRIQQLNSNFSQLLEEKNTLSIQLCDTSQSLRENQQHYGDLLNHCAVLEKQVQELQAGPLNIDVAPGAPQEKNGVHRKSDPEELREPQQSFSEAQQQLCNTRQEVNELRKLLEEERDQRVAAENALSVAEEQIRRLEHSEWDSSRTPIIGSCGTQEQALLIDLTSNSCRRTRSGVGWKRVLRSLCHSRTRVPLLAAIYFLMIHVLLILCFTGHL

SEQ ID NO: 101 - protein, 156 aa, Homo sapiens
MALEKSLVRLLLLVLILLVLGWVQPSLGKESRAKKFQRQHMDSDSSPSSSSTYCNQMMRRRNMTQGRCKPVNTFVHEPLVDVQNVCFQEKVTCKNGQGNCYKSNSSMHITDCRLTNGSRYPNCAYRTSPKERHIIVACEGSPYVPVHFDASVEDST

SEQ ID NO: 102 - protein, 1941 aa, Homo sapiens
MAQGSGGREGALRTPAGGWHSPPSPDMQELLRSVERDLSIDPRQLAPAPGGTHVVALVPARWLASLRDRRLPLGPCPRAEGLGEAEVRTLLQRSVQRLPAGWTRVEVHGLRKRRLSYPLGGGLPFEDGSCGPETLTRFMQEVAAQNYRNLWRHAYHTYGQPYSHSPAPSAVPALDSVRQALQRVYGCSFLPVGETTQCPSYAREGPCPPRGSPACPSLLRAEALLESPEMLYVVHPYVQFSLHDVVTFSPAKLTNSQAKVLFILFRVLRAMDACHRQGLACGALSLYHIAVDEKLCSELRLDLSAYERPEEDENEEAPVARDEAGIVSQEEQGGQPGQPTGQEELRSLVLDWVHGRISNFHYLMQLNRLAGRRQGDPNYHPVLPWVVDFTTPHGRFRDLRKSKFRLNKGDKQLDFTYEMTRQAFVAGGAGGGEPPHVPHHISDVLSDITYYVYKARRTPRSVLCGHVRAQWEPHEYPASMERMQNWTPDECIPEFYTDPSIFRSIHPDMPDLDVPAWCSSSQEFVAAHRALLESREVSRDLHHWIDLTFGYKLQGKEAVKEKNVCLHLVDAHTHLASYGVVQLFDQPHPQRLAGAPALAPEPPLIPKLLVQTIQETTGREDFTENPGQLPNGVGRPVLEATPCEASWTRDRPVAGEDDLEQATEALDSISLAGKAGDQLGSSSQASPGLLSFSVASASRPGRRNKAAGADPGEGEEGRILLPEGFNPMQALEELEKTGNFLAKGLGGLLEVPEQPRVQPAVPLQCLLHRDMQALGVLLAEMVFATRVRTLQPDAPLWVRFQAVRGLCTRHPKEVPVSLQPVLDTLLQMSGPEVPMGAERGKLDQLFEYRPVSQGLPPPCPSQLLSPFSSVVPFPPYFPALHRFILLYQARRVEDEAQGRELVFALWQQLGAVLKDITPEGLEILLPFVLSLMSEEHTAVYTAWYLFEPVAKALGPKNANKYLLKPLIGAYESPCQLHGRFYLYTDCFVAQLMVRLGLQAFLTHLLPHVLQVLAGAEASQEESKDLAGAAEEEESGLPGAGPGSCAFGEEIPMDGEPPASSGLGLPDYTSGVSFHDQADLPETEDFQAGLYVTESPQPQEAEAVSLGRLSDKSSTSETSLGEERAPDEGGAPVDKSSLRSGDSSQDLKQSEGSEEEEEEEDSCVVLEEEEGEQEEVTGASELTLSDTVLSMETVVAGGSGGDGEEEEEALPEQSEGKEQKILLDTACKMVRWLSAKLGPTVASRHVARNLLRLLTSCYVGPTRQQFTVSSGESPPLSAGNIYQKRPVLGDIVSGPVLSCLLHIARLYGEPVLTYQYLPYISYLVAPGSASGPSRLNSRKEAGLLAAVTLTQKIIVYLSDTTLMDILPRISHEVLLPVLSFLTSLVTGFPSGAQARTILCVKTISLIALICLRIGQEMVQQHLSEPVATFFQVFSQLHELRQQDLKLDPAGRGEGQLPQVVFSDGQQRPVDPALLDELQKVFTLEMAYTIYVPFSCLLGDIIRKIIPNHELVGELAALYLESISPSSRNPASVEPTMPGTGPEWDPHGGGCPQDDGHSGTFGSVLVGNRIQIPNDSRPENPGPLGPISGVGGGGLGSGSDDNALKQELPRSVHGLSGNWLAYWQYEIGVSQQDAHFHFHQIRLQSFPGHSGAVKCVAPLSSEDFFLSGSKDRTVRLWPLYNYGDGTSETAPRLVYTQHRKSVFFVGQLEAPQHVVSCDGAVHVWDPFTGKTLRTVEPLDSRVPLTAVAVMPAPHTSITMASSDSTLRFVDCRKPGLQHEFRLGGGLNPGLVRALAISPSGRSVVAGFSSGFMVLLDTRTGLVLRGWPAHEGDILQIKAVEGSVLVSSSSDHSLTVWKELEQKPTHHYKSASDPIHTFDLYGSEVVTGTVSNKIGVCSLLEPPSQATTKLSSENFRGTLTSLALLPTKRHLLLGSDNGVIRLLA

SEQ ID NO: 103 - protein, 822 aa, Homo sapiens
MNTADQARVGPADDGPAPSGEEEGEGGGEAGGKEPAADAAPGPSAAFRLMVTRREPAVKLQYAVSGLEPLAWSEDHRVSVSTARSIAVLELICDVHNPGQDLVIHRTSVPAPLNSCLLKVGSKTEVAECKEKFAASKDPTVSQTFMLDRVFNPEGKALPPMRGFKYTSWSPMGCDANGRCLLAALTMDNRLTIQANLNRLQWVQLVDLTEIYGERLYETSYRLSKNEAPEGNLGDFAEFQRRHSMQTPVRMEWSGICTTQQVKHNNECRDVGSVLLAVLFENGNIAVWQFQLPFVGKESISSCNTIESGITSPSVLFWWEYEHNNRKMSGLIVGSAFGPIKILPVNLKAVKGYFTLRQPVILWKEMDQLPVHSIKCVPLYHPYQKCSCSLVVAARGSYVFWCLLLISKAGLNVHNSHVTGLHSLPIVSMTADKQNGTVYTCSSDGKVRQLIPIFTDVALKFEHQLIKLSDVFGSVRTHGIAVSPCGAYLAIITTEGMINGLHPVNKNYQVQFVTLKTFEEAAAQLLESSVQNLFKQVDLIDLVRWKILKDKHIPQFLQEALEKKIESSGVTYFWRFKLFLLRILYQSMQKTPSEALWKPTHEDSKILLVDSPGMGNADDEQQEEGTSSKQVVKQGLQERSKEGDVEEPTDDSLPTTGDAGGREPMEEKLLEIQGKIEAVEMHLTREHMKRVLGEVYLHTWITENTSIPTRGLCNFLMSDEEYDDRTARVLIGHISKKMNKQTFPEHCSLCKEILPFTDRKQAVCSNGHIWLRCFLTYQSCQSLIYRRCLLHDSIARHPAPEDPDWIKRLLQSPCPFCDSPVF

SEQ ID NO: 104 - protein, 689 aa, Homo sapiens
MAAATASPRSLLVLLQVVVLALAQIRGPPGERGPPGPPGPPGVPGSDGIDGDNGPPGKAGPPGPKGEPGKAGPDGPDGKPGIDGLTGAKGEPGPMGIPGVKGQPGLPGPPGLPGPGFAGPPGPPGPVGLPGEIGIRGPKGDPGPDGPSGPPGPPGKPGRPGTIQGLEGSADFLCPTNCPPGMKGPPGLQGVKGHAGKRGILGDPGHQGKPGPKGDVGASGEQGIPGPPGPQGIRGYPGMAGPKGETGPHGYKGMVGAIGATGPPGEEGPRGPPGRAGEKGDEGSPGIRGPQGITGPKGATGPPGINGKDGTPGTPGMKGSAGQAGQPGSPGHQGLAGVPGQPGTKGGPGDQGEPGPQGLPGFSGPPGKEGEPGPRGEIGPQGIMGQKGDQGERGPVGQPGPQGRQGPKGEQGPPGIPGPQGLPGVKGDKGSPGKTGPRGKVGDPGVAGLPGEKGEKGESGEPGPKGQQGVRGEPGYPGPSGDAGAPGVQGYPGPPGPRGLAGNRGVPGQPGRQGVEGRDATDQHIVDVALKMLQEQLAEVAVSAKREALGAVGMMGPPGPPGPPGYPGKQGPHGHPGPRGVPGIVGAVGQIGNTGPKGKRGEKGDPGEVGRGHPGMPGPPGIPGLPGRPGQAINGKDGDRGSPGAPGEAGRPGLPGPVGLPGFCEPAACLGASAYASARLTEPGSIKGP

SEQ ID NO: 105 - protein, 256 aa, Homo sapiens
MASGRPEELWEAVVGAAERFRARTGTELVLLTAAPPPPPRPGPCAYAAHGRGALAEAARRCLHDIALAHRAATAARPPAPPPAPQPPSPTPSPPRPTLAREDNEEDEDEPTETETSGEQLGISDNGGLFVMDEDATLQDLPPFCESDPESTDDGSLSEETPAGPPTCSVPPASALPTQQYAKSLPVSVPVWGFKEKRTEARSSDEENGPPSSPDLDRIAASMRALVLREAEDTQVFGDLPRPRLNTSDFQKLKRKY

SEQ ID NO: 106 - protein, 1231 aa, Homo sapiens
MRLLAKIICLMLWAICVAEDCNELPPRRNTEILTGSWSDQTYPEGTQAIYKCRPGYRSLGNVIMVCRKGEWVALNPLRKCQKRPCGHPGDTPFGTFTLTGGNVFEYGVKAVYTCNEGYQLLGEINYRECDTDGWTNDIPICEVVKCLPVTAPENGKIVSSAMEPDREYHFGQAVRFVCNSGYKIEGDEEMHCSDDGFWSKEKPKCVEISCKSPDVINGSPISQKIIYKENERFQYKCNMGYEYSERGDAVCTESGWRPLPSCEEKSCDNPYIPNGDYSPLRIKHRTGDEITYQCRNGFYPATRGNTAKCTSTGWIPAPRCTLKPCDYPDIKHGGLYHENMRRPYFPVAVGKYYSYYCDEHFETPSGSYWDHIHCTQDGWSPAVPCLRKCYFPYLENGYNQNHGRKFVQGKSIDVACHPGYALPKAQTTVTCMENGWSPTPRCIRVKTCSKSSIDIENGFISESQYTYALKEKAKYQCKLGYVTADGETSGSITCGKDGWSAQPTCIKSCDIPVFMNARTKNDFTWFKLNDTLDYECHDGYESNTGSTTGSIVCGYNGWSDLPICYERECELPKIDVHLVPDRKKDQYKVGEVLKFSCKPGFTIVGPNSVQCYHFGLSPDLPICKEQVQSCGPPPELLNGNVKEKTKEEYGHSEVVEYYCNPRFLMKGPNKIQCVDGEWTTLPVCIVEESTCGDIPELEHGWAQLSSPPYYYGDSVEFNCSESFTMIGHRSITCIHGVWTQLPQCVAIDKLKKCKSSNLIILEEHLKNKKEFDHNSNIRYRCRGKEGWIHTVCINGRWDPEVNCSMAQIQLCPPPPQIPNSHNMTTTLNYRDGEKVSVLCQENYLIQEGEEITCKDGRWQSIPLCVEKIPCSQPPQIEHGTINSSRSSQESYAHGTKLSYTCEGGFRISEENETTCYMGKWSSPPQCEGLPCKSPPEISHGVVAHMSDSYQYGEEVTYKCFEGFGIDGPAIAKCLGEKWSHPPSCIKTDCLSLPSFENAIPMGEKKDVYKAGEQVTYTCATYYKMDGASNVTCINSRWTGRPTCRDTSCVNPPTVQNAYIVSRQMSKYPSGERVRYQCRSPYEMFGDEEVMCLNGNWTEPPQCKDSTGKCGPPPPIDNGDITSFPLSVYAPASSVEYQCQNLYQLEGNKRITCRNGQWSEPPKCLHPCVISREIMENYNIALRWTAKQKLYSRTGESVEFVCKRGYRLSSRSHTLRTTCWDGKLEYPTCAKR

SEQ ID NO: 107 - protein, 562 aa, Homo sapiens
MRPEPGGCCCRRTVRANGCVANGEVRNGYVRSSAAAAAAAAAGQIHHVTQNGGLYKRPFNEAFEETPMLVAVLTYVGYGVLTLFGYLRDFLRYWRIEKCHHATEREEQKDFVSLYQDFENFYTRNLYMRIRDNWNRPICSVPGARVDIMERQSHDYNWSFKYTGNIIKGVINMGSYNYLGFARNTGSCQEAAAKVLEEYGAGVCSTRQEIGNLDKHEELEELVARFLGVEAAMAYGMGFATNSMNIPALVGKGCLILSDELNHASLVLGARLSGATIRIFKHNNMQSLEKLLKDAIVYGQPRTRRPWKKILILVEGIYSMEGSIVRLPEVIALKKKYKAYLYLDEAHSIGALGPTGRGVVEYFGLDPEDVDVMMGTFTKSFGASGGYIGGKKELIDYLRTHSHSAVYATSLSPPVVEQIITSMKCIMGQDGTSLGKECVQQLAENTRYFRRRLKEMGFIIYGNEDSPVVPLMLYMPAKIGAFGREMLKRNIGVVVVGFPATPIIESRARFCLSAAHTKEILDTALKEIDEVGDLLQLKYSRHRLVPLLDRPFDETTYEETED

SEQ ID NO: 108 - protein, 683 aa, Homo sapiens
MALFVRLLALALALALGPAATLAGPAKSPYQLVLQHSRLRGRQHGPNVCAVQKVIGTNRKYFTNCKQWYQRKICGKSTVISYECCPGYEKVPGEKGCPAALPLSNLYETLGVVGSTTTQLYTDRTEKLRPEMEGPGSFTIFAPSNEAWASLPAEVLDSLVSNVNIELLNALRYHMVGRRVLTDELKHGMTLTSMYQNSNIQIHHYPNGIVTVNCARLLKADHHATNGVVHLIDKVISTITNNIQQIIEIEDTFETLRAAVAASGLNTMLEGNGQYTLLAPTNEAFEKIPSETLNRILGDPEALRDLLNNHILKSAMCAEAIVAGLSVETLEGTTLEVGCSGDMLTINGKAIISNKDILATNGVIHYIDELLIPDSAKTLFELAAESDVSTAIDLFRQAGLGNHLSGSERLTLLAPLNSVFKDGTPPIDAHTRNLLRNHIIKDQLASKYLYHGQTLETLGGKKLRVFVYRNSLCIENSCIAAHDKRGRYGTLFTMDRVLTPPMGTVMDVLKGDNRFSMLVAAIQSAGLTETLNREGVYTVFAPTNEAFRALPPRERSRLLGDAKELANILKYHIGDEILVSGGIGALVRLKSLQGDKLEVSLKNNVVSVNKEPVAEPDIMATNGVVHVITNVLQPPANRPQERGDELADSALEIFKQASAFSRASQRSVRLAPVYQKLLERMKH

SEQ ID NO: 109 - protein, 1342 aa, Homo sapiens
MKRIFSLLEKTWLGAPIQFAWQKTSGNYLAVTGADYIVKIFDRHGQKRSEINLPGNCVAMDWDKDGDVLAVIAEKSSCIYLWDANTNKTSQLDNGMRDQMSFLLWSKVGSFLAVGTVKGNLLIYNHQTSRKIPVLGKHTKRITCGCWNAENLLALGGEDKMITVSNQEGDTIRQTQVRSEPSNMQFFLMKMDDRTSAAESMISVVLGKKTLFFLNLNEPDNPADLEFQQDFGNIVCYNWYGDGRIMIGFSCGHFVVISTHTGELGQEIFQARNHKDNLTSIAVSQTLNKVATCGDNCIKIQDLVDLKDMYVILNLDEENKGLGTLSWTDDGQLLALSTQRGSLHVFLTKLPILGDACSTRIAYLTSLLEVTVANPVEGELPITVSVDVEPNFVAVGLYHLAVGMNNRAWFYVLGENAVKKLKDMEYLGTVASICLHSDYAAALFEGKVQLHLIESEILDAQEERETRLFPAVDDKCRILCHALTSDFLIYGTDTGVVQYFYIEDWQFVNDYRHPVSVKKIFPDPNGTRLVFIDEKSDGFVYCPVNDATYEIPDFSPTIKGVLWENWPMDKGVFIAYDDDKVYTYVFHKDTIQGAKVILAGSTKVPFAHKPLLLYNGELTCQTQSGKVNNIYLSTHGFLSNLKDTGPDELRPMLAQNLMLKRFSDAWEMCRILNDEAAWNELARACLHHMEVEFAIRVYRRIGNVGIVMSLEQIKGIEDYNLLAGHLAMFTNDYNLAQDLYLASSCPIAALEMRRDLQHWDSALQLAKHLAPDQIPFISKEYAIQLEFAGDYVNALAHYEKGITGDNKEHDEACLAGVAQMSIRMGDIRRGVNQALKHPSRVLKRDCGAILENMKQFSEAAQLYEKGLYYDKAASVYIRSKNWAKVGDLLPHVSSPKIHLQYAKAKEADGRYKEAVVAYENAKQWQSVIRIYLDHLNNPEKAVNIVRETQSLDGAKMVARFFLQLGDYGSAIQFLVMSKCNNEAFTLAQQHNKMEIYADIIGSEDTTNEDYQSIALYFEGEKRYLQAGKFFLLCGQYSRALKHFLKCPSSEDNVAIEMAIETVGQAKDELLTNQLIDHLLGENDGMPKDAKYLFRLYMALKQYREAAQTAIIIAREEQSAGNYRNAHDVLFSMYAELKSQKIKIPSEMATNLMILHSYILVKIHVKNGDHMKGARMLIRVANNISKFPSHIVPILTSTVIECHRAGLKNSAFSFAAMLMRPEYRSKIDAKYKKKIEGMVRRPDISEIEEATTPCPFCKFLLPECELLCPGCKNSIPYCIATGRHMLKDDWTVCPHCDFPALYSELKIMLNTESTCPMCSERLNAAQLKKISDCTQYLRTEEEL

SEQ ID NO: 110 - protein, 544 aa, Homo sapiens
MSRCAQAAEVAATVPGAGVGNVGLRPPMVPRQASFFPPPVPNPFVQQTQIGSARRVQIVLLGIILLPIRVLLVALILLLAWPFAAISTVCCPEKLTHPITGWRRKITQTALKFLGRAMFFSMGFIVAVKGKIASPLEAPVFVAAPHSTFFDGIACVVAGLPSMVSRNENAQVPLIGRLLRAVQPVLVSRVDPDSRKNTINEIIKRTTSGGEWPQILVFPEGTCTNRSCLITFKPGAFIPGVPVQPVLLRYPNKLDTVTWTWQGYTFIQLCMLTFCQLFTKVEVEFMPVQVPNDEEKNDPVLFANKVRNLMAEALGIPVTDHTYEDCRLMISAGQLTLPMEAGLVEFTKISRKLKLDWDGVRKHLDEYASIASSSKGGRIGIEEFAKYLKLPVSDVLRQLFALFDRNHDGSIDFREYVIGLAVLCNPSNTEEIIQVAFKLFDVDEDGYITEEEFSTILQASLGVPDLDVSGLFKEIAQGDSISYEEFKSFALKHPEYAKIFTTYLDLQTCHVFSLPKEVQTTPSTASNKVSPEKHEESTSDKKDD

SEQ ID NO: 111 - protein, 182 aa, Homo sapiens
MWPPDPDPDPDPEPAGGSRPGPAVPGLRALLPARAFLCSLKGRLLLAESGLSFITFICYVASSASAFLTAPLLEFLLALYFLFADAMQLNDKWQGLCWPMMDFLRCVTAALIYFAISITAIAKYSDGASKAAGVFGFFATIVFATDFYLIFNDVAKFLKQGDSADETTAHKTEEENSDSDSD

SEQ ID NO: 112 - protein, 612 aa, Homo sapiens
MAAAGRLPSSWALFSPLLAGLALLGVGPVPARALHNVTAELFGAEAWGTLAAFGDLNSDKQTDLFVLRERNDLIVFLADQNAPYFKPKVKVSFKNHSALITSVVPGDYDGDSQMDVLLTYLPKNYAKSELGAVIFWGQNQTLDPNNMTILNRTFQDEPLIMDFNGDLIPDIFGITNESNQPQILLGGNLSWHPALTTTSKMRIPHSHAFIDLTEDFTADLFLTTLNATTSTFQFEIWENLDGNFSVSTILEKPQNMMVVGQSAFADFDGDGHMDHLLPGCEDKNCQKSTIYLVRSGMKQWVPVLQDFSNKGTLWGFVPFVDEQQPTEIPIPITLHIGDYNMDGYPDALVILKNTSGSNQQAFLLENVPCNNASCEEARRMFKVYWELTDLNQIKDAMVATFFDIYEDGILDIVVLSKGYTKNDFAIHTLKNNFEADAYFVKVIVLSGLCSNDCPRKITPFGVNQPGPYIMYTTVDANGYLKNGSAGQLSQSAHLALQLPYNVLGLGRSANFLDHLYVGIPRPSGEKSIRKQEWTAIIPNSQLIVIPYPHNVPRSWSAKLYLTPSNIVLLTAIALIGVCVFILAIIGILHWQEKKADDREKRQEAHRFHFDAM

SEQ ID NO: 113 - protein, 1213 aa, Homo sapiens
MRSRNQGGESASDGHISCPKPSIIGNAGEKSLSEDAKKKKKSNRKEDDVMASGTVKRHLKTSGECERKTKKSLELSKEDLIQLLSIMEGELQAREDVIHMLKTEKTKPEVLEAHYGSAEPEKVLRVLHRDAILAQEKSIGEDVYEKPISELDRLEEKQKETYRRMLEQLLLAEKCHRRTVYELENEKHKHTDYMNKSDDFTNLLEQERERLKKLLEQEKAYQARKEKENAKRLNKLRDELVKLKSFALMLVDERQMHIEQLGLQSQKVQDLTQKLREEEEKLKAITSKSKEDRQKLLKLEVDFEHKASRFSQEHEEMNAKLANQESHNRQLRLKLVGLTQRIEELEETNKNLQKAEEELQELRDKIAKGECGNSSLMAEVENLRKRVLEMEGKDEEITKTESQCRELRKKLQEEEHHSKELRLEVEKLQKRMSELEKLEEAFSKSKSECTQLHLNLEKEKNLTKDLLNELEVVKSRVKELECSESRLEKAELSLKDDLTKLKSFTVMLVDERKNMMEKIKQEERKVDGLNKNFKVEQGKVMDVTEKLIEESKKLLKLKSEMEEKVYNLTRERDELIGKLKSEEEKSSELSCSVDLLKKRLDGIEEVEREITRGRSRKGSELTCPEDNKIKELTLEIERLKKRLQQLEVVEGDLMKTEDEYDQLEQKFRTEQDKANFLSQQLEEIKHQIAKNKAIEKGEVVSQEAELRHRFRLEEAKSRDLKAEVQALKEKIHELMNKEDQLSQLQVDYSVLQQRFMEEENKNKNMGQEVLNLTKELELSKRYSRALRPSVNGRRMVDVPVTSTGVQTDAVSGEAAEEETPAVFIRKSFQEENHIMSNLRQVGLKKPVERSSVLDRYPPAANELTMRKSWIPWMRKRENGPSITQEKGPRTNSSPGHPGEVVLSPKQGQPLHIRVTPDHENSTATLEITSPTSEEFFSSTTVIPTLGNQKPRITIIPSPNVMPQKQKSGDTTLGPERAMSPVTITTFSREKTPESGRGAFADRPTSPIQIMTVSTSAAPAEIAVSPESQEMPMGRTILKVTPEKQTVPTPVRKYNSNANIITTEDNKIHIHLGSQFKRSPGTSGEGVSPVITVRPVNVTAEKEVSTGTVLRSPRNHLSSRPGASKVTSTITITPVTTSSARGTQSVSGQDGSSQRPTPTRIPMSKGMKAGKPVVAAPGAGNLTKFEPRAETQSMKIELKKSAASSTTSLGGGKG

SEQ ID NO: 114 - protein, 643 aa, Homo sapiens
MASVALEDVAVNFTREEWALLGPCQKNLYKDVMQETIRNLDCVGMKWKDQNIEDQYRYPRKNLRCRMLERFVESKDGTQCGETSSQIQDSIVTKNTLPGVGPYESRMSGEVIMGHSSLNCYIRVGAGHKPYEYHECGEKPDTHKQRGKAFSYHNSLQTHERLHTGKKPYNCKECGKSFSSLGNLQRHMAVQRGDGPYKCKLCGKAFFWPSLLHMHERTHTGEKPYECKQCSKAFSFYSSYLRHERTHTGEKLYECKQCSKAFPDYSSCLRHERTHTGKKPYTCKQCGKAFSASTSLRRHETTHTDEKPYACQQCGKAFHHLGSFQRHMVMHTRDGPHKCKICGKGFDCPSSLKSHERTHTGEKLYECKQCGKALSHSSSFRRHMTMHTGDGPHKCKICGKAFVYPSVFQRHEKTHTAEKPYKCKQCGKAYRISSSLRRHETTHTGEKPYKCKCGKAFIDFYSFQNHKTTHAGEKPYECKECGKAFSCFQYLSQHRRTHTGEKPYECNTCKKAFSHFGNLKVHERIHSGEKPYECKECGKAFSWLTCFLRHERIHMREKPYECQQCGKAFTHSRFLQGHEKTHTGENPYECKECGKAFASLSSLHRHKKTHWKKTHTGENPYGCKECGKAFASLSSLHRHKKTH

SEQ ID NO: 115 - protein, 337 aa, Homo sapiens
MNPESSIFIEDYLKYFQDQVSRENLLQLLTDDEAWNGFVAAAELPRDEADELRKALNKLASHMVMKDKNRHDKDQQHRQWFLKEFPRLKRELEDHIRKLRALAEEVEQVHRGTTIANVVSNSVGTTSGILTLLGLGLAPFTEGISFVLLDTGMGLGAAAAVAGITCSVVELVNKLRARAQARNLDQSGTNVAKVMKEFVGGNTPNVLTLVDNWYQVTQGIGRNIRAIRRARANPQLGAYAPPPHIIGRISAEGGEQVERVVEGPAQAMSRGTMIVGAATGGILLLLDVVSLAYESKHLLEGAKSESAEELKKRAQELEGKLNFLTKIHEMLQPGQDQ

SEQ ID NO: 116 - protein, 463 aa, Homo sapiens
MGRKKIQITRIMDERNRQVTFTKRKFGLMKKAYELSVLCDCEIALIIFNSTNKLFQYASTDMDKVLLKYTEYNEPHESRTNSDIVEALNKKENKGCESPDPDSSYALTPRTEEKYKKINEEFDNMIKSHKIPAVPPPNFEMPVSIPVSSHNSLVYSNPVSSLGNPNLLPLAHPSLQRNSMSPGVTHRPPSAGNTGGLMGGDLTSGAGTSAGNGYGNPRNSPGLLVSPGNLNKNMQAKSPPPMNLGMNNRKPDLRVLIPPGSKNTMPSVNQRINNSQSAQSLATPVVSVATPTLPGQGMGGYPSAISTTYGTEYSLSSADLSSLSGFNTASALHLGSVTGWQQQHLHNMPPSALSQLGACTSTHLSQSSNLSLPSTQSLNIKSEPVSPPRDRTTTPSRYPQHTRHEAGRSPVDSLSSCSSSYDGSDREDHRNEFHSPIGLTRPSPDERESPSVKRMRLSEGWAT

SEQ ID NO: 117 - protein, 704 aa, Homo sapiens
MANENHGSPREEASLLSHSPGTSNQSQPCSPKPIRLVQDLPEELVHAGWEKCWSRRENRPYYFNRFTNQSLWEMPVLGQHDVISDPLGLNATPLPQDSSLVETPPAENKPRKRQLSEEQPSGNGVKKPKIEIPVTPTGQSVPSSPSIPGTPTLKMWGTSPEDKQQAALLRPTEVYWDLDIQTNAVIKHRGPSEVLPPHPEVELLRSQLILKLRQHYRELCQQREGIEPPRESFNRWMLERKVVDKGSDPLLPSNCEPVVSPSMFREIMNDIPIRLSRIKFREEAKRLLFKYAEAARRLIESRSASPDSRKVVKWNVEDTFSWLRKDHSASKEDYMDRLEHLRRQCGPHVSAAAKDSVEGICSKIYHISLEYVKRIREKHLAILKENNISEEVEAPEVEPRLVYCYPVRLAVSAPPMPSVEMHMENNVVCIRYKGEMVKVSRNYFSKLWLLYRYSCIDDSAFERFLPRVWCLLRRYQMMFGVGLYEGTGLQGSLPVHVFEALHRLFGVSFECFASPLNCYFRQYCSAFPDTDGYFGSRGPCLDFAPLSGSFEANPPFCEELMDAMVSHFERLLESSPEPLSFIVFIPEWREPPTPALTRMEQSRFKRHQLILPAFEHEYRSGSQHICKKEEMHYKAVHNTAVLFLQNDPGFAKWAPTPERLQELSAAYRQSGRSHSSGSSSSSSSEAKDRDSGREQGPSREPHPT

SEQ ID NO: 118 - protein, 396 aa, Homo sapiens
MSIVTVQLGQCGNQIGFEVFDALLSDSHSSQGLCSMRENEAYQASCKERFFSEEENGVPIARAVLVDMEPKVINQMLSKAAQSGQWKYGQHACFCQKQGSGNNWAYGYSVHGPRHEESIMNIIRKEVEKCDSFSGFFIIMSMAGGTGSGLGAFVTQNLEDQYSNSLKMNQIIWPYGTGEVIVQNYNSILTLSHLYRSSDALLLHENDAIHKICAKLMNIKQISFSDINQVLAHQLGSVFQPTYSAESSFHYRRNPLGDLMEHLVPHPEFKMLSVRNIPHMSENSLAYTTFTWAGLLKHLRQMLISNAKMEEGIDRHVWPPLSGLPPLSKMSLNKDLHFNTSIANLVILRGKDVQSADVGKKFRAYIHQYTKFGIEEEDFLDSFTSLEQVVASYCNL

SEQ ID NO: 119 - protein, 1158 aa, Homo sapiens
MTHGEELGSDVHQDSIVLTYLEGLLMHQAAGGSGTAVDKKSAGHNEEDQNFNISGSAFPTCQSNGPVLNTHTYQGSGMLHLKKARLLQSSEDWNAAKRKRLSDSIMNLNVKKEALLAGMVDSVPKGKQDSTLLASLLQSFSSRLQTVALSQQIRQSLKEQGYALSHDSLKVEKDLRCYGVASSHLKTLLKKSKVKDQKPDTNLPDVTKNLIRDRFAESPHHVGQSGTKVMSEPLSCAARLQAVASMVEKRASPATSPKPSVACSQLALLLSSEAHLQQYSREHALKTQNANQAASERLAAMARLQENGQKDVGSYQLPKGMSSHLNGQARTSSSKLMASKSSATVFQNPMGIIPSSPKNAGYKNSLERNNIKQAANNSLLLHLLKSQTIPKPMNGHSHSERGSIFEESSTPTTIDEYSDNNPSFTDDSSGDESSYSNCVPIDLSCKHRTEKSESDQPVSLDNFTQSLLNTWDPKVPDVDIKEDQDTSKNSKLNSHQKVTLLQLLLGHKNEENVEKNTSPQGVHNDVSKFNTQNYARTSVIESPSTNRTTPVSTPPLLTSSKAGSPINLSQHSLVIKWNSPPYVCSTQSEKLTNTASNHSMDLTKSKDPPGEKPAQNEGAQNSATFSASKLLQNLAQCGMQSSMSVEEQRPSKQLLTGNTDKPIGMIDRLNSPLLSNKTNAVEENKAFSSQPTGPEPGLSGSEIENLLERRTVLQLLLGNPNKGKSEKKEKTPLRDESTQEHSERALSEQILMVKIKSEPCDDLQIPNTNVHLSHDAKSAPFLGMAPAVQRSAPALPVSEDFKSEPVSPQDFSFSKNGLLSRLLRQNQDSYLADDSDRSHRNNEMALLESKNLCMVPKKRKLYTEPLENPFKKMKNNIVDAANNHSAPEVLYGSLLNQEELKFSRNDLEFKYPAGHGSASESEHRSWARESKSFNVLKQLLLSENCVRDLSPHRSNSVADSKKKGHKNNVTNSKPEFSISSLNGLMYSSTQPSSCMDNRTFSYPGVVKTPVSPTFPEHLGCAGSRPESGLLNGCSMPSEKGPIKWVITDAEKNEYEKDSPRLTKTNPILYYMLQKGGNSVTSRETQDKDIWREASSAESVSQVTAKEELLPTAETKASFFNLRSPYNSHMGNNASRPHSANGEVYGLLGSVLTIKKESE

SEQ ID NO: 120 - protein, 459 aa, Homo sapiens
MAPLCPSPWLPLLIPAPAPGLTVQLLLSLLLLVPVHPQRLPRMQEDSPLGGGSSGEDDPLGEEDLPSEEDSPREEDPPGEEDLPGEEDLPGEEDLPEVKPKSEEEGSLKLEDLPTVEAPGDPQEPQNNAHRDKEGDDQSHWRYGGDPPWPRVSPACAGRFQSPVDIRPQLAAFCPALRPLELLGFQLPPLPELRLRNNGHSVQLTLPPGLEMALGPGREYRALQLHLHWGAAGRPGSEHTVEGHRFPAEIHVVHLSTAFARVDEALGRPGGLAVLAAFLEEGPEENSAYEQLLSRLEEIAEEGSETQVPGLDISALLPSDFSRYFQYEGSLTTPPCAQGVIWTVFNQTVMLSAKQLHTLSDTLWGPGDSRLQLNFRATQPLNGRVIEASFPAGVDSSPRAAEPVQLNSCLAAGDILALVFGLLFAVTSVAFLVQMRRQHRRGTKGGVSYRPAEVAETGA

SEQ ID NO: 121 - protein, 501 aa, Homo sapiens
MPSASASRKSQEKPREIMDAAEDYAKERYGISSMIQSQEKPDRVLVRVRDLTIQKADEVVWVRARVHTSRAKGKQCFLVLRQQQFNVQALVAVGDHASKQMVKFAANINKESIVDVEGVVRKVNQKIGSCTQQDVELHVQKIYVISLAEPRLPLQLDDAVRPEAEGEEEGRATVNQDTRLDNRVIDLRTSTSQAVFRLQSGICHLFRETLINKGFVEIQTPKIISAASEGGANVFTVSYFKNNAYLAQSPQLYKQMCICADFEKVFSIGPVFRAEDSNTHRHLTEFVGLDIEMAFNYHYHEVMEEIADTMVQIFKGLQERFQTEIQTVNKQFPCEPFKFLEPTLRLEYCEALAMLREAGVEMGDEDDLSTPNEKLLGHLVKEKYDTDFYILDKYPLAVRPFYTMPDPRNPKQSNSYDMFMRGEEILSGAQRIHDPQLLTERALHHGIDLEKIKAYIDSFRFGAPPHAGGGIGLERVTMLFLGLHNVRQTSMFPRDPKRLTP

SEQ ID NO: 122 - protein, 670 aa, Homo sapiens
MIQSSSTPTRDLAPKDRNGTSDPFVRVRYKGRTRETSIVKKSCYPRWNETFEFELQEGAMEALCVEAWDWDLVSRNDFLGKVVIDVQRLRVVQQEEGWFRLQPDQSKSRRHDEGNLGSLQLEVRLRDETVLPSSYYQPLVHLLCHEVKLGMQGPGQLIPLIEETTSTECRQDVATNLLKLFLGQGLAKDFLDLLFQLELSRTSETNTLFRSNSLASKSVESFLKVAGMQYLHGVLGPIINKVFEEKKYVELDPSKVEVKDVGCSGLHRPQTEAEVLEQSAQTLRAHLGALLSALSRSVRACPAVVRATFRQLFRRVRERFPGAQHENVPFIAVTSFLCLRFFSPAIMSPKLFHLRERHADARTSRTLLLLAKAVQNVGNMDTPASRAKEAWMEPLQPTVHQGVAQLKDFITKLVDIEEKDELDLQRTLSLQAPPVKEGPLFIHRTKGKGPLMSSSFKKLYFSLTTEALSFAKTPSSKKSALIKLANIRAAEKVEEKSFGGSHVMQVIYTDDAGRPQTAYLQCKCVNELNQWLSALRKVSINNTGLLGSYHPGVFRGDKWSCCHQKEKTGQGCDKTRSRVTLQEWNDPLDHDLEAQLIYRHLLGVEAMLWERHRELSGGAEAGTVPTSPGKVPEDSLARLLRVLQDLREAHSSSPAGSPPSEPNCLLELQT

SEQ ID NO: 123 - protein, 1473 aa, Homo sapiens
MAGGAWGRLACYLEFLKKEELKEFQLLLANKAHSRSSSGETPAQPEKTSGMEVASYLVAQYGEQRAWDLALHTWEQMGLRSLCAQAQEGAGHSPSFPYSPSEPHLGSPSQPTSTAVLMPWIHELPAGCTQGSERRVLRQLPDTSGRRWREISASLLYQALPSSPDHESPSQESPNAPTSTAVLGSWGSPPQPSLAPREQEAPGTQWPLDETSGIYYTEIREREREKSEKGRPPWAAVVGTPPQAHTSLQPHHHPWEPSVRESLCSTWPWKNEDFNQKFTQLLLLQRPHPRSQDPLVKRSWPDYVEENRGHLIEIRDLFGPGLDTQEPRIVILQGAAGIGKSTLARQVKEAWGRGQLYGDRFQHVFYFSCRELAQSKVVSLAELIGKDGTATPAPIRQILSRPERLLFILDGVDEPGWVLQEPSSELCLHWSQPQPADALLGSLLGKTILPEASFLITARTTALQNLIPSLEQARWVEVLGFSESSRKEYFYRYFTDERQAIRAFRLVKSNKELWALCLVPWVSWLACTCLMQQMKRKEKLTLTSKTTTTLCLHYLAQALQAQPLGPQLRDLCSLAAEGIWQKKTLFSPDDLRKHGLDGAIISTFLKMGILQEHPIPLSYSFIHLCFQEFFAAMSYVLEDEKGRGKHSNCIIDLEKTLEAYGIHGLFGASTTRFLLGLLSDEGEREMENIFHCRLSQGRNLMQWVPSLQLLLQPHSLESLHCLYETRNKTFLTQVMAHFEEMGMCVETDMELLVCTFCIKFSRHVKKLQLIEGRQHRSTWSPTMVVLFRWVPVTDAYWQILFSVLKVTRNLKELDLSGNSLSHSAVKSLCKTLRRPRCLLETLRLAGCGLTAEDCKDLAFGLRANQTLTELDLSFNVLTDAGAKHLCQRLRQPSCKLQRLQLVSCGLTSDCCQDLASVLSASPSLKELDLQQNNLDDVGVRLLCEGLRHPACKLIRLGLDQTTLSDEMRQELRALEQEKPQLLIFSRRKPSVMTPTEGLDTGEMSNSTSSLKRQRLGSERAASHVAQANLKLLDVSKIFPIAEIAEESSPEVVPVELLCVPSPASQGDLHTKPLGTDDDFWGPTGPVATEVVDKEKNLYRVHFPVAGSYRWPNTGLCFVMREAVTVEIEFCVWDQFLGEINPQHSWMVAGPLLDIKAEPGAVEAVHLPHFVALQGGHVDTSLFQMAHFKEEGMLLEKPARVELHHIVLENPSFSPLGVLLKMIHNALRFIPVTSVVLLYHRVHPEEVTFHLYLIPSDCSIRKAIDDLEMKFQFVRIHKPPPLTPLYMGCRYTVSGSGSGMLEILPKELELCYRSPGEDQLFSEFYVGHLGSGIRLQVKDKKDETLVWEALVKPGDLMPATTLIPPARIAVPSPLDAPQLLHFVDQYREQLIARVTSVEVVLDKLHGQVLSQEQYERVLAENTRPSQMRKLFSLSQSWDRKCKDGLYQALKETHPHLIMELWEKGSKKGLLPLSS

SEQ ID NO: 124 - protein, 263 aa, Homo sapiens
MFRNQYDNDVTVWSPQGRIHQIEYAMEAVKQGSATVGLKSKTHAVLVALKRAQSELAAHQKKILHVDNHIGISIAGLTADARLLCNFMRQECLDSRFVFDRPLPVSRLVSLIGSKTQIPTQRYGRRPYGVGLLIAGYDDMGPHIFQTCPSANYFDCRAMSIGARSQSARTYLERHMSEFMECNLNELVKHGLRALRETLPAEQDLTTKNVSIGIVGKDLEFTIYDDDDVSPFLEGLEERPQRKAQPAQPADEPAEKADEPMEH

SEQ ID NO: 125 - protein, 466 aa, Homo sapiens
MVRSVAWAGFMVLLMIPWGSAAKLVCYFTNWAQYRQGEARFLPKDLDPSLCTHLIYAFAGMTNHQLSTTEWNDETLYQEFNGLKKMNPKLKTLLAIGGWNFGTQKFTDMVATANNRQTFVNSAIRFLRKYSFDGLDLDWEYPGSQGSPAVDKERFTTLVQDLANAFQQEAQTSGKERLLLSAAVPAGQTYVDAGYEVDKIAQNLDFVNLMAYDFHGSWEKVTGHNSPLYKRQEESGAAASLNVDAAVQQWLQKGTPASKLILGMPTYGRSFTLASSSDTRVGAPATGSGTPGPFTKEGGMLAYYEVCSWKGATKQRIQDQKVPYIFRDNQWVGFDDVESFKTKVSYLKQKGLGGAMVWALDLDDFAGFSCNQGRYPLIQTLRQELSLPYLPSGTPELEVPKPGQPSEPEHGPSPGQDTFCQGKADGLYPNPRERSSFYSCAAGRLFQQSCPTGLVFSNSCKCCTWN

SEQ ID NO: 126 - protein, 627 aa, Homo sapiens
MARGSVSDEEMMELREAFAKVDTDGNGYISFNELNDLFKAACLPLPGYRVREITENLMATGDLDQDGRISFDEFIKIFHGLKSTDVAKTFRKAINKKEGICAIGGTSEQSSVGTQHSYSEEEKYAFVNWINKALENDPDCRHVIPMNPNTNDLFNAVGDGIVLCKMINLSVPDTIDERTINKKKLTPFTIQENLNLALNSASAIGCHVVNIGAEDLKEGKPYLVLGLLWQVIKIGLFADIELSRNEALIALLREGESLEDLMKLSPEELLLRWANYHLENAGCNKIGNFSTDIKDSKAYYHLLEQVAPKGDEEGVPAVVIDMSGLREKDDIQRAECMLQQAERLGCRQFVTATDVVRGNPKLNLAFIANLFNRYPALHKPENQDIDWGALEGETREERTFRNWMNSLGVNPRVNHLYSDLSDALVIFQLYEKIKVPVDWNRVNKPPYPKLGGNMKKLENCNYAVELGKNQAKFSLVGIGGQDLNEGNRTLTLALIWQLMRRYTLNILEEIGGGQKVNDDIIVNWVNETLREAKKSSSISSFKDPKISTSLPVLDLIDAIQPGSINYDLLKTENLNDDEKLNNAKYAISMARKIGARVYALPEDLVEVNPKMVMTVFACLMGKGMKRV

SEQ ID NO: 127 - protein, 3259 aa, Homo sapiens; identical to SEQ ID NO: 100

SEQ ID NO: 128 - protein, 622 aa, Homo sapiens
MALRGTLRPLKVRRRREMLPQQVGFVCAVLALVCCASGLFGSLGHKTASASKRVLPDTWRNRKLMAPVNGTQTAKNCTDPAIHEFPTDLFSNKERQHGAVLLHILGALYMFYALAIVCDDFFVPSLEKICERLHLSEDVAGATFMAAGSSTPELFASVIGVFITHGDVGVGTIVGSAVFNILCIIGVCGLFAGQVVRLTWWAVCRDSVYYTISVIVLIVFIYDEQIVWWEGLVLIILYVFYILIMKYNVKMQAFFTVKQKSIANGNPVNSELEAGNDFYDGSYDDPSVPLLGQVKEKPQYGKNPVVMVDEIMSSSPPKFTFPEAGLRIMITNKFGPRTRLRMASRIIINERQRLINSANGVSSKPLQNGRHENIENGNVPVENPEDPQQNQEQQPPPQPPPPEPEPVEADFLSPFSVPEARGDKVKWVFTWPLIFLLCVTIPNCSKPRWEKFFMVTFITATLWIAVFSYIMVWLVTIIGYTLGIPDVIMGITFLAAGTSVPDCMASLIVARQGLGDMAVSNTIGSNVFDILVGLGVPWGLQTMVVNYGSTVKINSRGLVYSVVLLLGSVALTVLGIHLNKWRLDRKLGVYVLVLYAIFLCFSIMIEFNVFTFVNLPMCREDD

SEQ ID NO: 129 - protein, 1222 aa, Homo sapiens
MSEAPRFFVGPEDTEINPGNYRHFFHHADEDDEEEDDSPPERQIVVGICSMAKKSKSKPMKEILERISLFKYITVVVFEEEVILNEPVENWPLCDCLISFHSKGFPLDKAVAYAKLRNPFVINDLNMQYLIQDRREVYSILQAEGILLPRYAILNRDPNNPKECNLIEGEDHVEVNGEVFQKPFVEKPVSAEDHNVYIYYPTSAGGGSQRLFRKIGSRSSVYSPESNVRKTGSYIYEEFMPTDGTDVKVYTVGPDYAHAEARKSPALDGKVERDSEGKEVRYPVILNAREKLIAWKVCLAFKQTVCGFDLLRANGQSYVCDVNGFSFVKNSMKYYDDCAKILGNIVMRELAPQFHIPWSIPLEAEDIPIVPTTSGTMMELRCVIAVIRHGDRTPKQKMKMEVRHQKFFDLFEKCDGYKSGKLKLKKPKQLQEVLDIARQLLMELGQNNDSEIEENKPKLEQLKTVLEMYGHFSGINRKVQLTYLPHGCPKTSSEEEDSRREEPSLLLVLKWGGELTPAGRVQAEELGRAFRCMYPGGQGDYAGFPGCGLLRLHSTYRHDLKIYASDEGRVQMTAAAFAKGLLALEGELTPILVQMVKSANMNGLLDSDSDSLSSCQQRVKARLHEILQKDRDFTAEDYEKLTPSGSISLIKSMHLIKNPVKTCDKVYSLIQSLTSQIRHRMEDPKSSDIQLYHSETLELMLRRWSKLEKDFKTKNGRYDISKIPDIYDCIKYDVQHNGSLKLENTMELYRLSKALADIVIPQEYGITKAEKLEIAKGYCTPLVRKIRSDLQRTQDDDTVNKLHPVYSRGVLSPERHVRTRLYFTSESHVHSLLSILRYGALCNESKDEQWKRAMDYLNVVNELNYMTQIVIMLYEDPNKDLSSEERFHVELHFSPGAKGCEEDKNLPSGYGYRPASRENEGRRPFKIDNDDEPHTSKRDEVDRAVILFKPMVSEPIHIHRKSPLPRSRKTATNDEESPLSVSSPEGTGTWLHYTSGVGTGRRRRRSGEQITSSPVSPKSLAFTSSIFGSWQQVVSENANYLRTPRTLVEQKQNPTVGSHCAGLFSTSVLGGSSSAPNLQDYARTHRKKLTSSGCIDGFELYSMVPSICPLETLHNALSLKQVDEFLASIASPSSDVPRKTAEISSTALRSSPIMRKKVSLNTYTPAKILPTPPATLKSTKASSKPATSGPSSAVVPNTSSRKKNITSKTETHEHKKNTGKKK

SEQ ID NO: 130 - protein, 575 aa, Homo sapiens
MSHAAEPARDGVEASAEGPRAVFVLLEERRPADSAQLLSLNSLLPESGIVADIELENVLDPDSFYELKSQPLPLRSSLPISLQATPATPATLSASSSAGGSRTPAMSSSSSSRVLLRQQLMRAQAQEQERRERREQAAAAPFPSPAPASPAISVVGVSAGGHTLSRPPPAQVPREVLKVQTHLENPTRYHLQQARRQQVKQYLSTTLGPKLASQALTPPPGPASAQPLPAPEAAHTTGPTGSAPNSPMALLTIGSSSEKEIDDVIDEIISLESSYNDEMLSYLPGGTTGLQLPSTLPVSGNLLDVYSSQGVATPAITVSNSCPAELPNIKREISETEAKALLKERQKKDNHNLIERRRRFNINDRIKELGTLIPKSSDPEMRWNKGTILKASVDYIRKLQKEQQRSKDLESRQRSLEQANRSLQLRIQELELQAQIHGLPVPPTPGLLSLATTSASDSLKPEQLDIEEEGRPGAATFHVGGGPAQNAPHQQPPAPPSDALLDLHFPSDHLGDLGDPFHLGLEDILMEEEEGVVGGLSGGALSPLRAASDPLLSSVSPAVSKASSRRSSFSMEEES

SEQ ID NO: 131 - protein, 1391 aa, Homo sapiens
MNSPVDPGARQALRKKPPERTPEDLNTIYSYLHGMEILSNLREHQLRLMSARARYERYSGNQVLFCSETIARCWYILLSGSVLVKGSMVLPPCSFGKQFGGKRGCDCLVLEPSEMIVVENAKDNEDSILQREIPARQSRRRFRKINYKGERQTITDDVEVNSYLSLPADLTKMHLTENPHPQVTHVSSSQSGCSIASDSGSSSLSDIYQATESEVGDVDLTRLPEGPVDSEDDEEEDEEIDRTDPLQGRDLVRECLEKEPADKTDDDIEQLLEFMHQLPAFANMTMSVRRELCSVMIFEVVEQAGAIILEDGQELDSWYVILNGTVEISHPDGKVENLFMGNSFGITPTLDKQYMHGIVRTKVDDCQFVCIAQQDYWRILNHVEKNTHKVEEEGEIVMVHEHRELDRSGTRKGHIVIKATPERLIMHLIEEHSIVDPTYIEDFLLTYRTFLESPLDVGIKLLEWFKIDSLRDKVTRIVLLWVNNHFNDFEGDPAMTRFLEEFEKNLEDTKMNGHLRLLNIACAAKAKWRQVVLQKASRESPLQFSLNGGSEKGFGIFVEGVEPGSKAADSGLKRGDQIMEVNGQNFENITFMKAVEILRNNTHLALTVKTNIFVFKELLFRTEQEKSGVPHIPKIAEKKSNRHSIQHVPGDIEQTSQEKGSKKVKANTVSGGRNKIRKILDKTRFSILPPKLFSDGGLSQSQDDSIVGTRHCRHSLAIMPIPGTLSSSSPDLLQPTTSMLDFSNPSDIPDQVIRVFKVDQQSCYIIISKDTTAKEVVFHAVHEFGLTGASDTYSLCEVSVTPEGVIKQRRLPDQFSKLADRIQLNGRYYLKNNMETETLCSDEDAQELVKESQLSMLQLSTIEVATQLSMRDFDLFRNIEPTEYIDDLFKLNSKTGNTHLKRFEDIVNQETFWVASEILTEANQLKRMKIIKHFIKIALHCRECKNFNSMFAIISGLNLASVARLRGTWEKLPSKYEKHLQDLQDIFDPSRNMAKYRNILSSQSMQPPIIPLFPVVKKDMTFLHEGNDSKVDGLVNFEKLRMISKEIRQVVRMTSANMDPAMMFRQRSLSQGSTNSNMLDVQGGAHKKRARRSSLLNAKKLYEDAQMARKVKQYLSSLDVETDEEKFQMMSLQWEPAYGTLTKNLSEKRSAKSSEMSPVPMRSAGQTTKAHLHQPHRVSQVLQVPAVNLHPIRKKGQTKDPALNTSLPQKVLGTTEEISGKKHTEDTISVASSLHSSPPASPQGSPHKVGSIISDHSSKISGQSCPGIGGAYLQKKILQITRSTAKRTDSTEKATEENRDRTSCENTTRKRMTSPFRRLRERMLSRERLVNSQKEDTDHNQATESCEKVKDVGSNIKDEKGSAIFNSNSQGNSNTLNCFYTRFKSKRRKTL

SEQ ID NO: 132 - protein, 565 aa, Homo sapiens
MEDSDSAAKQLGLAEAAAVAAAAAVAAAAAAAAGGEAEEPVLSRDEDSEEDADSEAERETPRVTAVAVMAAEPGHMDMGAEALPGPDEAAAAAAFAEVTTVTVANVGAAADNVFTTSVANAASISGHVLSGRTALQIGDSLNTEKATLIVVHTDGSIVETTGLKGPAAPLTPGPQSPPTPLAPGQEKGGTKYNWDPSVYDSELPVRCRNISGTLYKNRLGSGGRGRCIKQGENWYSPTEFEAMAGRASSKDWKRSIRYAGRPLQCLIQDGILNPHAASCTCAACCDDMTLSGPVRLFVPYKRRKKENELPTTPVKKDSPKNITLLPATAATTFTVTPSGQITTSGALTFDRASTVEATAVISESPAQGDVFAGATVQEASVQPPCRASHPEPHYPGYQDSCQIAPFPEAALPTSHPKIVLTSLPALAVPPPTPTKAAPPALVNGLELSEPRSWLYLEEMVNSLLNTAQQLKTLFEQAKHASTYREAATNQAKIHADAERKEQSCVNCGREAMSECTGCHKVNYCSTFCQRKDWKDHQHICGQSAAVTVQADEVHVAESVMEKVTV

SEQ ID NO: 133 - protein, 1454 aa, Homo sapiens
MAPVQLENHQLVPPGGGGGGSGGPPSAPAPPPPGAAVAAAAAAAASPGYRLSTLIEFLLHRAYSELMVLTDLLPRKSDVERKIEIVQFASRTRQLFVRLLALVKWANNAGKVEKCAMISSFLDQQAILFVDTADRLASLARDALVHARLPSFAIPYAIDVLTTGSYPRLPTCIRDKIIPPDPITKIEKQATLHQLNQILRHRLVTTDLPPQLANLTVANGRVKFRVEGEFEATLTVMGDDPDVPWRLLKLEILVEDKETGDGRALVHSMQISFIHQLVQSRLFADEKPLQDMYNCLHSFCLSLQLEVLHSQTLMLIRERWGDLVQVERYHAGKCLSLSVWNQQVLGRKTGTASVHKVTIKIDENDVSKPLQIFHDPPLPASDSKLVERAMKIDHLSIEKLLIDSVHARAHQKLQELKAILRGFNANENSSIETALPALVVPILEPCGNSECLHIFVDLHSGMFQLMLYGLDQATLDDMEKSVNDDMKRIIPWIQQLKFWLGQQRCKQSIKHLPTISSETLQLSNYSTHPIGNLSKNKLFIKLTRLPQYYIVVEMLEVPNKPTQLSYKYYFMSVNAADREDSPAMALLLQQFKENIQDLVFRTKTGKQTRTNAKRKLSDDPCPVESKKTKRAGEMCAFNKVLAHFVAMCDTNMPFVGLRLELSNLEIPHQGVQVEGDGFSHAIRLLKIPPCKGITEETQKALDRSLLDCTFRLQGRNNRTWVAELVFANCPLNGTSTREQGPSRHVYLTYENLLSEPVGGRKVVEMFLNDWNSIARLYECVLEFARSLPDIPAHLNIFSEVRVYNYRKLILCYGTTKGSSISIQWNSIHQKFHISLGTVGPNSGCSNCHNTILHQLQEMFNKTPNVVQLLQVLFDTQAPLNAINKLPTVPMLGLTQRTNTAYQCFSILPQSSTHIRLAFRNMYCIDIYCRSRGVVAIRDGAYSLFDNSKLVEGFYPAPGLKTFLNMFVDSNQDARRRSVNEDDNPPSPIGGDMMDSLISQLQPPPQQQPFPKQPGTSGAYPLTSPPTSYHSTVNQSPSMMHTQSPGNLHAASSPSGALRAPSPASFVPTPPPSSHGISIGPGASFASPHGTLDPSSPYTMVSPSGRAGNWPGSPQVSGPSPAARMPGMSPANPSLHSPVPDASHSPRAGTSSQTMPTNMPPPRKLPQRSWAASIPTILTHSALNILLLPSPTPGLVPGLAGSYLCSPLERFLGSVIMRRHLQRIIQQETLQLINSNEPGVIMFKTDALKCRVALSPKTNQTLQLKVTPENAGQWKPDELQVLEKFFETRVAGPPFKANTLIAFTKLLGAPTHILRDCVHIMKLELFPDQATQLKWNVQFCLTIPPSAPPIAPPGTPAVVLKSKMLFFLQLTQKTSVPPQEPVSIIVPIIYDMASGTTQQADIPRQQNSSVAAPMMVSNILKRFAEMNPPRQGECTIFAAVRDLMANLTLPPGGRP

SEQ ID NO: 134 - protein, 877 aa, Homo sapiens
MCDLRRPAAGGMMDLAYVCEWEKWSKSTHCPSVPLACAWSCRNLIAFTMDLRSDDQDLTRMIHILDTEHPWDLHSIPSEHHEAITCLEWDQSGSRLLSADADGQIKCWSMADHLANSWESSVGSLVEGDPIVALSWLHNGVKLALHVEKSGASSFGEKFSRVKFSPSLTLFGGKPMEGWIAVTVSGLVTVSLLKPSGQVLTSTESLCRLRGRVALADIAFTGGGNIVVATADGSSASPVQFYKVCVSVVSEKCRIDTEILPSLFMRCTTDLNRKDKFPAITHLKFLARDMSEQVLLCASSQTSSIVECWSLRKEGLPVNNIFQQISPVVGDKQPTILKWRILSATNDLDRVSAVALPKLPISLTNTDLKVASDTQFYPGLGLALAFHDGSVHIVHRLSLQTMAVFYSSAAPRPVDEPAMKRPRTAGPAVHLKAMQLSWTSLALVGIDSHGKLSVLRLSPSMGHPLEVGLALRHLLFLLEYCMVTGYDWWDILLHVQPSMVQSLVEKLHEEYTRQTAALQQVLSTRILAMKASLCKLSPCTVTRVCDYHTKLFLIAISSTLKSLLRPHFLNTPDKSPGDRLTEICTKITDVDIDKVMINLKTEEFVLDMNTLQALQQLLQWVGDFVLYLLASLPNQGSLLRPGHSFLRDGTSLGMLRELMVVIRIWGLLKPSCLPVYTATSDTQDSMSLLFRLLTKLWICCRDEGPASEPDEALVDECCLLPSQLLIPSLDWLPASDGLVSRLQPKQPLRLQFGRAPTLPGSAATLQLDGLARAPGQPKIDHLRRLHLGACPTEECKACTRCGCVTMLKSPNRTTAVKQWEQRWIKNCLAVEGRGPDACVTSRASEEAPAFVQLGPQSTHHSPRTPRSLDHLHPEDRP

SEQ ID NO: 135 - protein, 318 aa, Homo sapiens
MSAHNRGTELDLSWISKIQVNHPAVLRRAEQIQARRTVKKEWQAAWLLKAVTFIDLTTLSGDDTSSNIQRLCYKAKYPIREDLLKALNMHDKGITTAAVCVYPARVCDAVKALKAAGCNIPVASVAAGFPAGQTHLKTRLEEIRLAVEDGATEIDVVINRSLVLTGQWEALYDEIRQFRKACGEAHLKTILATGELGTLTNVYKASMIAMMAGSDFIKTSTGKETVNATFPVAIVMLRAIRDFFWKTGNKIGFKPAGGIRSAKDSLAWLSLVKEELGDEWLKPELFRIGASTLLSDIERQIYHHVTGRYAAYHDLPMS

SEQ ID NO: 136 - protein, 562 aa, Homo sapiens; identical to SEQ ID NO: 107

SEQ ID NO: 137 - protein, 485 aa, Homo sapiens
MNEYPKKRKRKTLHPSRYSDSSGISRIADGFNGIFSDHCYSVCSMRQPDLKYFDNKDDDSDTETSNDLPKFADGIKARNRNQNYLVPSPVLRILDHTAFSTEKSADIVICDEECDSPESVNQQTQEESPIEVHTAEDVPIAVEVHAISEDYDIETENNSSESLQDQTDEEPPAKLCKILDKSQALNVTAQQKWPLLRANSSGLYKCELCEFNSKYFSDLKQHMILKHKRTDSNVCRVCKESFSTNMLLIEHAKLHEEDPYICKYCDYKTVIFENLSQHIADTHFSDHLYWCEQCDVQFSSSSELYLHFQEHSCDEQYLCQFCEHETNDPEDLHSHVVNEHACKLIELSDKYNNGEHGQYSLLSKITFDKCKNFFVCQVCGFRSRLHTNVNRHVAIEHTKIFPHVCDDCGKGFSSMLEYCKHLNSHLSEGIYLCQYCEYSTGQIEDLKIHLDFKHSADLPHKCSDCLMRFGNERELISHLPVHETT

SEQ ID NO: 138 - protein, 821 aa, Homo sapiens
MDPECAQLLPALCAVLVDPRQPVADDTCLEKLLDWFKTVTEGESSVVLLQEHPCLVELLSHVLKVQDLSSGVLSFSLRLAGTFAAQENCFQYLQQGELLPGLFGEPGPLGRATWAVPTVRSGWIQGLRSLAQHPSALRFLADHGAVDTIFSLQGDSSLFVASAASQLLVHVLALSMRGGAEGQPCLPGGDWPACAQKIMDHVEESLCSAATPKVTQALNVLTTTFGRCQSPWTEALWVRLSPRVACLLERDPIPAAHSFVDLLLCVARSPVFSSSDGSLWETVARALSCLGPTHMGPLALGILKLEHCPQALRTQAFQVLLQPLACVLKATVQAPGPPGLLDGTADDATTVDTLLASKSSCAGLLCRTLAHLEELQPLPQRPSPWPQASLLGATVTVLRLCDGSAAPASSVGGHLCGTLAGCVRVQRAALDFLGTLSQGTGPQELVTQALAVLLECLESPGSSPTVLKKAFQATLRWLLSSPKTPGCSDLGPLIPQFLRELFPVLQKRLCHPCWEVRDSALEFLTQLSRHWGGQADFRCALLASEVPQLALQLLQDPESYVRASAVTAMGQLSSQGLHAPTSPEHAEARQSLFLELLHILSVDSEGFPRRAVMQVFTEWLRDGHADAAQDTEQFVATVLQAASRDLDWEVRAQGLELALVFLGQTLGPPRTHCPYAVALPEVAPAQPLTEALRALCHVGLFDFAFCALFDCDRPVAQKSCDLLLFLRDKIASYSSLREARGSPNTASAEATLPRWRAGEQAQPPGDQEPEAVLAMLRSLDLEGLRSTLAESSDHVEKSPQSLLQDMLATGGFLQGDEADCY

SEQ ID NO: 139 - protein, 221 aa, Homo sapiens; identical to SEQ ID NO: 87
